(19) United States
(12) Patent Application Publication
(10) Pub. No.: US 2023/0137672 A1
(43) Pub. Date: May 4, 2023

(54) IMMUNOTHERAPEUTIC TARGETS IN MULTIPLE MYELOMA AND METHODS FOR THEIR IDENTIFICATION

(71) Applicant: THE TRUSTEES OF INDIANA UNIVERSITY, Bloomington, IN (US)

(72) Inventor: Fabiana PERNA, Indianapolis, IN (US)

(21) Appl. No.: 17/913,189

(22) PCT Filed: Mar. 26, 2021
(86) PCT No.: PCT/US2021/024431

§ 371 Date: Sep. 21, 2022

Related U.S. Application Data
(60) Provisional application No. 63/000,694, filed on Mar. 27, 2020.

(51) Int. Cl. C07K 14/725; C12Q 1/6886; G01N 33/574

(52) U.S. Cl. CPC C07K 14/7051; C12Q 1/6886; G01N 33/574; C12Q 2600/158; A61K 2039/5158

(57) ABSTRACT

Surface proteins predominantly associated with multiple myeloma are identified as potential targets for developing anti-multiple myeloma therapeutics. In accordance with one embodiment antibodies are generated that specifically bind to epitopes of the identified protein that are associated with multiple myeloma cells. These antibodies can then be used to target the delivery of cytotoxic agents to multiple myeloma cells in a patient or used to prepare CAR T-cells for the treatment of multiple myeloma patients.

### CROSS REFERENCE TO RELATED APPLICATIONS

[0001] This application claims priority to U.S. Provisional Patent Application No. 63/000,694 filed on Mar. 27, 2020, the disclosure of which is expressly incorporated herein.

### INCORPORATION BY REFERENCE OF MATERIAL SUBMITTED ELECTRONICALLY

[0002] Incorporated by reference in its entirety is a computer-readable nucleotide/amino acid sequence listing submitted concurrently herewith and identified as follows: 1,490 kilobytes ASCII (text) file named “335022_ST25,” created on Mar. 22, 2021.

### BACKGROUND OF THE DISCLOSURE

[0003] Multiple myeloma (MM), also known as plasma cell myeloma, is a cancer of plasma cells, a type of white blood cell that normally produces antibodies. Globally, multiple myeloma affected 488,000 people and resulted in 101,100 deaths in 2015. In the United States, it develops in 6.5 per 100,000 people per year and 0.7% of people are affected at some point in their lives. Without treatment, typical survival is seven months. With current treatments, survival is usually 4-5 years.

[0004] Targeting tumor antigens with immunotherapy is rapidly emerging as a promising approach for cancer treatment. This is based on successes of antibody-mediated checkpoint blockade and engineered T cells. In MM, monoclonal antibodies, antibody-drug conjugates, bi-specific antibody constructs, and Chimeric Antigen Receptor (CAR) T-cell therapy targeting BCMA (B-cell maturation antigen) are significantly improving survival in patients with MM. Data from >20 clinical trials involving anti-BCMA CAR T cells have demonstrated that patients with relapsed and/or refractory MM can achieve objective responses.

[0005] While tremendous progress in the treatment of Multiple Myeloma (MM) has been made over the past 25 years, myeloma remains an incurable disease, with a particularly poor prognosis for patients with refractory relapsed MM (RRMM) or high-risk cytogenetics. The remarkable success of CD19-Chimeric Antigen Receptor (CAR) T cells in patients with lymphoid malignancies has prompted the development of CAR T cells for treating MM. BCMA (aka TNFRSF17) is the first surface target utilized to generate CAR T cells for patients with RRMM who have undergone at least three prior treatments, including treatment with a proteasome inhibitor and an immunomodulatory agent. Targeting BCMA with antibody conjugates and bispecific T-cell engagers (BiTE; a unique artificial bispecific monoclonal antibody that has two linked, single-chain variable fragments and having a 1+1 antigen-binding valency) has been demonstrated to have efficacy in treating MM. Both BCMA targeting immune-therapies were granted breakthrough status for patients with RRMM by FDA. All these trials demonstrate impressive results with the ability of anti-BCMA CAR T cells to induce deep responses in highly pretreated RRMM, however, despite this, remissions are not sustained and the majority of patients eventually relapse. One of the mechanisms of resistance lies in the antigen loss or downregulation with the emergence of low BCMA or BCMA-negative subclones. Identifying alternative targets is crucial to provide therapeutic options to patients who failed BCMA CAR therapy and/or design combinatorial strategies limiting the risk of antigen escape. One of the most important determinants of the success of CAR T-cell therapy is the choice of the target antigen; an ideal target should be highly expressed on all tumor cells, on cancer stem cells, in most patients, absent in normal counterparts and most organs of the whole body. Given that, studying the myeloma surface proteome is critical to identify additional immunotherapeutic targets and understand the role of an altered surfaceome in the disease biology. In fact, surface proteins may mediate regulatory mechanisms underpinning myeloma manipulation of the bone marrow microenvironment.

[0006] To this purpose, one aspect of the present disclosure is directed to the use of high-quality Mass-Spectrometry methodologies and generated integrative bioinformatics tools to unbiasedly and accurately map the cell surface of MM cell lines and primary MM patient samples bearing distinct genetic backgrounds. These helped overcome the challenge of studying surface proteins that present with low abundance, high hydrophobicity and heavy post-translational modifications compared to intracellular proteins. In accordance with the present disclosure methods are provided for identifying additional targets that can be used to design alternative CAR T-cell therapeutics beyond BCMA.

### SUMMARY

[0007] The present disclosure is directed to the identification of candidate cell surface antigens that can be utilized as immuno-therapeutic targets for developing novel drugs including antibodies and CAR T cells for diagnosing and treating patients with Multiple Myeloma. The antibodies of the present invention can also be used to identify disease markers for diagnostic purposes like flow cytometry. In accordance with one embodiment the identified targets disclosed herein have the potential to serve as marker for identifying and treating those Multiple Myeloma (MM) patients that display surface targets significantly associated with features of poor prognosis (i.e. associated with high-risk MM).

[0008] In accordance with one embodiment a method is provided for identifying target cell surface antigens that are specific for multiple myeloma cells and can be used as immuno-therapeutic targets. In one embodiment the method comprises performing surface-specific proteomic analyses of multiple myeloma cell lines bearing distinct genetic abnormalities using biotin labeling followed by Mass-Spectrometry analysis (MS). In a further embodiment RNA-seq datasets of MM patients are investigated to identify surface proteins whose gene expression is elevated in MM patients relative to normal tissues. In one embodiment, a method is provided for identifying target cell surface antigens that are specific for multiple myeloma cells wherein the method comprises Mass-Spectrometry analysis of surface labeled proteins and analysis of RNA-seq datasets of MM patients to identify proteins common to both analysis as target cell surface antigens.

[0009] In accordance with one embodiment cell surface polypeptides having the sequence of SEQ ID NO: 1 through SEQ ID NO: 155 have been identified as being associated with MM cells. Accordingly, the peptides of SEQ ID NO: 1-155 represent targets for immuno-based therapeutic strategies for treating MM. In accordance with one embodiment an antibody that specifically binds to a polypeptide selected from the group consisting of SEQ ID NO: 1-155 is provided. In accordance with one embodiment the antibody is a monoclonal antibody. Also encompassed by the present invention are antibody fragments wherein the fragment retains the ability to bind to the same epitope as the whole antibody.

[0010] In accordance with one embodiment cell surface polypeptides IL12RB1, SLC5A3, CCR1, ANKH, IL27RA, S1PR4, TLR1, KCNA3, PSEN2, BCMA, IL2RG, LILRB4, IL6R, ITGB7, LRP10, FCRL3, IFNGR1, SLAMF6, SLCO3A1, LILRB1, PLXNA3, SLC17A5, CD28, LAX1, NEMP1, TMEM154, SEMA4A, C10orf54, ITM2C, LY9, SLAMF7, ITGA4, LRRC8A, LRRC8D, CD320, KCNN4, PLXNC1, CD37, SELPLG, DAGLB, ABCC4, ADAMS, CD4, CD180, CD48, CD40, MCUR1, ABCC5, IL6ST, LRP8, SLC5A6, SLC7A6, HLA-F, ICAM2, LEPROT, ITGAL, TMEM63A, CMTM7, IL10RB, NDC1, PTPRCAP, ANTXR2, ABCA7, FCGR2B, ACVR1B, STS, ABHD12, TNFRSF10A, HVCN1, SLC39A10, EMP3, ABCC1, SLC26A6, SLC6A6, CCR10, SLC30A1, SLC231A1, ADCY3, IFNAR1, PTPRJ, CLDND1, SLC30A5, SLC6A9, ADAM15, IGF2R, INSR, NOTCH2, CD53, SLC12A9, SLC15A4, CEMIP2, ADAM17, MPZL1 and TACI have been identified as being associated with MM cells. Accordingly, these peptides represent targets for immuno-based therapeutic strategies for treating MM. In accordance with one embodiment an antibody that specifically binds to one of these polypeptides is provided. In accordance with one embodiment the antibody is a monoclonal antibody. Also encompassed by the present invention are antibody fragments wherein the fragment retains the ability to bind to the same epitope as the whole antibody.

[0011] In accordance with one embodiment cell surface polypeptides IL12RB1, CCR1, LILRB4, FCRL3, IFNGR1, SLAMF6, LAX1, SEMA4A, ITGA4, LRRC8D and CD320 have been identified as being associated with MM cells. Accordingly, these peptides represent targets for immuno-based therapeutic strategies for treating MM. In accordance with one embodiment an antibody that specifically binds to one of these polypeptides is provided. In accordance with one embodiment the antibody is a monoclonal antibody. Also encompassed by the present invention are antibody fragments wherein the fragment retains the ability to bind to the same epitope as the whole antibody.

[0012] In accordance with one embodiment an antibody or antibody fragment is provided that binds to a polypeptide selected from the group consisting of SEQ ID NO: 1-115. In accordance with one embodiment the antibody or antibody fragment binds to a polypeptide selected from the group consisting of SEQ ID NO: 1-10. In accordance with one embodiment the antibody or antibody fragment binds to a polypeptide selected from the group consisting of SEQ ID NO: 11-20. In accordance with one embodiment the antibody or antibody fragment binds to a polypeptide selected from the group consisting of SEQ ID NO: 21-30. In accordance with one embodiment the antibody or antibody fragment binds to a polypeptide selected from the group consisting of SEQ ID NO: 31-40. In accordance with one embodiment the antibody or antibody fragment binds to a polypeptide selected from the group consisting of SEQ ID NO: 41-50. In accordance with one embodiment the antibody or antibody fragment binds to a polypeptide selected from the group consisting of SEQ ID NO: 51-60. In accordance with one embodiment the antibody or antibody fragment binds to a polypeptide selected from the group consisting of SEQ ID NO: 61-70. In accordance with one embodiment the antibody or antibody fragment binds to a polypeptide selected from the group consisting of SEQ ID NO: 71-80. In accordance with one embodiment the antibody or antibody fragment binds to a polypeptide selected from the group consisting of SEQ ID NO: 81-90. In accordance with one embodiment the antibody or antibody fragment binds to a polypeptide selected from the group consisting of SEQ ID NO: 91-100. In accordance with one embodiment the antibody or antibody fragment binds to a polypeptide selected from the group consisting of SEQ ID NO: 101-110. In accordance with one embodiment the antibody or antibody fragment binds to a polypeptide selected from the group consisting of SEQ ID NO: 111-120. In accordance with one embodiment the antibody or antibody fragment binds to a polypeptide selected from the group consisting of SEQ ID NO: 121-130. In accordance with one embodiment the antibody or antibody fragment binds to a polypeptide selected from the group consisting of SEQ ID NO: 131-140. In accordance with one embodiment the antibody or antibody fragment binds to a polypeptide selected from the group consisting of SEQ ID NO: 141-147.

[0013] In accordance with one embodiment a monoclonal antibody is provided that specifically binds to a polypeptide selected from the group consisting of SEQ ID NO: 168-208. In accordance with one embodiment a monoclonal antibody is provided wherein the antibody specifically binds to a polypeptide having as least 90, 95 or 99% sequence identity to a polypeptide selected from the group consisting of SEQ ID NO: 19, SEQ ID NO: 20, SEQ ID NO: 37, SEQ ID NO: 42, SEQ ID NO: 54, SEQ ID NO: 56, SEQ ID NO: 57, SEQ ID NO: 79, SEQ ID NO: 112 and SEQ ID NO: 104.

[0014] In accordance with one embodiment a monoclonal antibody is provided wherein the antibody specifically binds to a polypeptide having as least 90, 95 or 99% sequence identity to a polypeptide selected from the group consisting of CCR1 (SEQ ID NO: 60), CD320 (SEQ ID NO: 56), FCRL3(SEQ ID NO: 57), IFNGR1 (SEQ ID NO: 79), IL12RB1 (SEQ ID NO: 19), ITGA4 (SEQ ID NO: 42), LILRB4 (SEQ ID NO: 20), LRRC8D (SEQ ID NO: 112), SEMA4A (SEQ ID NO: 104), SLAMF6 (SEQ ID NO: 37) and TNFRSF17 (SEQ ID NO: 167).

[0015] In accordance with one embodiment a monoclonal antibody is provided wherein the antibody specifically binds to a polypeptide having as least 90, 95 or 99% sequence identity to a polypeptide selected from the group consisting of IL12RB1, CCR1(SEQ ID NO: 60), LILRB4 (SEQ ID NO: 20), FCRL3 (SEQ ID NO: 57), IFNGR1 (SEQ ID NO: 79), SLAMF6 (SEQ ID NO: 37), SEMA4A (SEQ ID NO: 104), ITGA4 (SEQ ID NO: 42), LRRC8D (SEQ ID NO: 112) and CD320 (SEQ ID NO: 56).

[0016] In accordance with one embodiment a monoclonal antibody is provided wherein the antibody specifically binds to a polypeptide having as least 90, 95 or 99% sequence identity to a polypeptide selected from the group consisting of SEQ ID NO: 1-155 or 168-208, optionally wherein the polypeptide selected from the group consisting of SEQ ID NO: 168-208.

[0017] In accordance with one embodiment any of the antibodies disclosed herein optionally further comprises a detectable marker and/or a cytotoxic agent linked to the antibody.

[0018] In accordance with one embodiment a composition is provided comprising 2, 3, 4, 5, 6, 7, 8, 9 or more of any of the antibodies disclosed herein wherein the plurality of antibodies each binds a different epitope displayed by the polypeptides of SEQ ID NO: 1 through SEQ ID NO: 155.

[0019] In accordance with one embodiment any of the antibodies disclosed herein is linked to a solid support. In one embodiment any of the antibodies disclosed herein is covalently linked to a detectable label. In one embodiment any of the antibodies disclosed herein is covalently linked a cytotoxic agent.

[0020] In accordance with one embodiment a chimeric antigen receptor (CAR) is provided comprising

[0021] an antibody, or antigen binding fragment thereof, that binds one or more epitopes of a polypeptide selected from the group consisting of SEQ ID NO: 1-155,

[0022] a transmembrane domain; and

[0023] aT-cell antigen receptor chain, wherein the transmembrane domain links the an antibody, or antigen binding fragment thereof to the T-cell antigen receptor chain.

[0024] In accordance with one embodiment a chimeric antigen receptor (CAR) is provided comprising

[0025] an antibody single-chain variable fragment that specifically binds to one or more epitopes of a polypeptide selected from the group consisting of SEQ ID NO: 1-155, a transmembrane domain; and a T-cell antigen receptor chain, wherein the transmembrane domain links the antibody single-chain variable fragment to the T-cell antigen receptor chain. In one embodiment the T-cell antigen receptor chain of the chimeric antigen receptor comprises a CD3ζ chain (zeta-chain). In one embodiment the chimeric antigen receptor specifically binds to a polypeptide selected from the group consisting of SEQ ID NO: 1-25, or a polypeptide selected from the group consisting of SEQ ID NO: 25-50, or polypeptide selected from the group consisting of SEQ ID NO: 50-75, or a polypeptide selected from the group consisting of SEQ ID NO: 75-100, or a polypeptide selected from the group consisting of SEQ ID NO: 100-125. In accordance with one embodiment the chimeric antigen receptor further comprises a hinge region located between the antibody single-chain variable fragment and the transmembrane domain.

[0026] In accordance with one embodiment a modified T-cell (CAR T-cell) is provided wherein the T-cell has been transformed to express a chimeric antigen receptor of the present disclosure that specifically binds to a polypeptide selected from the group consisting of SEQ ID NO 1-155. In one embodiment the T-cell antigen receptor chain of the chimeric antigen receptor is a CD3ζ chain (zeta-chain).

[0027] In one embodiment a pharmaceutical composition is provided comprising any of the antibodies, chimeric antigen receptors or CAR T-cells as disclosed herein, optionally including a pharmaceutically acceptable carrier. The pharmaceutical composition can be formulated using standard techniques for any suitable route of administration including intravenously or intraperitoneally.

[0028] In accordance with one embodiment a method for treating multiple myeloma is provided. In one embodiment the method comprises administering a therapeutic amount of any of the antibodies, chimeric antigen receptors or CAR T-cells of the present disclosure to a patient in need of such treatment. In one embodiment the compositions is administered as a pharmaceutical composition comprising any of the antibodies, chimeric antigen receptors or CAR T-cells as disclosed herein and a pharmaceutically acceptable carrier.

[0029] In accordance with one embodiment a method of treating MM comprises administering CAR T-cells that express chimeric antigen receptors that specifically bind to a polypeptide selected from the group consisting of SEQ ID NO: 1-155. In one embodiment the treatment is conducted in conjunction with other known therapeutic treatments known to the skilled practitioner, including the co-administration of CAR T-cells directed to BCMA or other known surface candidate targets in MM including the antigens SLAMF7, CD38, GPRC5D, ITGB7, CD229, CD56, TACI, CD19 and CD70.

### BRIEF DESCRIPTION OF THE DRAWINGS

[0030] FIGS. 1A-1D represent the steps for identifying target MM genes, FIG. 1A is a schematic representation of the biotinylation of the surface proteins of 7 different MM cell lines followed by Spectrometry analysis. Each cell line bears unique combinations of chromosomal rearrangements and p53 mutations as shown. This analysis led to the identification of 5,454 uniprot IDs corresponding to 4761 proteins FIG. 1B is a schematic representation of the integrated database used to generated for cell surface molecule annotation. For each repository we indicated the methodology used for cell surface molecule annotation and relative size. This also served as a scoring system with 0 denoting a protein not at the cell surface location and 5 a protein detected in all five repositories. The number of IDs per score is also indicated. 16,462 transcripts derived from 904 patients with multiple myeloma were annotated for cell surface molecules. FIG. 1C presents a Venn Diagram showing the overlap between cell surface molecules with a score equal or higher than 3 as detected by Mass-Spectrometer analysis in cell lines and RNA-seq in primary patient samples. As shown in FIG. 1D expression levels of the cell surface molecules was analyzed and by excluding molecules with an expression below 1 SD from the average patient gene expression 326 surface proteins were selected for further analyses.

[0031] FIGS. 2A-2C: Enrichment analysis of candidate targets. 326 surface proteins selected in FIG. 1D were analyzed by STRING. A significant number of edges was identified (490) that is higher than expected (109) with an average local functional and/or physical local clustering coefficient of 0.326 and a PPI enrichment p value <1.0e-16. In yellow the largest cluster. The largest cluster (227/326 proteins) involves proteins with a functional enrichment related to immune pathways (FIG. 2A). The other two clusters involve transporters and adhesion molecules FIG. 2B). Additional enrichment analysis of the largest cluster by the KEGG collection is shown in FIG. 2C. Further enrichment analysis of the largest cluster by the Reactome collection is shown.

[0032] FIG. 3 provides a Venn Diagram overlapping the targets with a potential biological relevance (227 molecules involved in immune-related pathways) and therapeutic relevance (94 molecules with minimal expression in normal tissues). 67 common targets are common. 24 out of those 67 targets presented the most favorable expression profile in primary patients and were used for validation in patient samples including: CCR1, CD28, CD320, FCRL3, IFNGR1, IL12RB1. IL27RA. IL2RG, IL6R, ITGA4, KCNN4, LAX1, LILRB1, LILRB4, LRRC8A, LRRC8D, PLXNA3, PLXNC1, S1PR4, SELPLG, SEMA4A, SLAMF6, TLR1 and BCMA.

### DETAILED DESCRIPTION

### Definitions

[0033] Unless defined otherwise, all technical and scientific terms used herein have the same meanings as commonly understood by one of ordinary skill in the art to which this invention belongs.

[0034] The term “about” as used herein means greater or lesser than the value or range of values stated by 10 percent, but is not intended to designate any value or range of values to only this broader definition. Each value or range of values preceded by the term “about” is also intended to encompass the embodiment of the stated absolute value or range of values.

[0035] As used herein the terms “native” or “natural” define a condition found in nature. A “native DNA sequence” is a DNA sequence present in nature that was produced by natural means but not generated by genetic engineering (e.g., using molecular biology/transformation techniques)

[0036] As used herein the term “solid support” relates to a solvent insoluble substrate that is capable of forming linkages (preferably covalent bonds) with soluble molecules. The support can be either biological in nature, such as, without limitation, a cell or bacteriophage particle, or synthetic, such as, without limitation, an acrylamide derivative, glass, plastic, agarose, cellulose, nylon, silica, or magnetized particles. The support can be in particulate form or a monolythic strip or sheet. The surface of such supports may be solid or porous and of any convenient shape.

[0037] The term “linked” or like terms refers to the connection between two groups. The linkage may comprise a covalent, ionic, or hydrogen bond or other interaction that binds two compounds or substances to one another.

[0038] As used herein, the term “purified” and like terms relate to an enrichment of a molecule or compound relative to other components normally associated with the molecule or compound in a native environment. The term “purified” does not necessarily indicate that complete purity of the particular molecule has been achieved during the process. A “highly purified” compound as used herein refers to a compound that is greater than 90% pure.

[0039] “Therapeutic agent,” “pharmaceutical agent” or “drug” refers to any therapeutic or prophylactic agent which may be used in the treatment (including the prevention, diagnosis, alleviation, or cure) of a malady, affliction, disease or injury in a patient.

[0040] As used herein, the term “pharmaceutically acceptable carrier” includes any of the standard pharmaceutical carriers, such as a phosphate buffered saline solution, water, emulsions such as an oil/water or water/oil emulsion, and various types of wetting agents. The term also encompasses any of the agents approved by a regulatory agency of the US Federal government or listed in the US Pharmacopeia for use in animals, including humans.

[0041] As used herein, the term “treating” includes alleviating the symptoms associated with a specific disorder or condition and/or preventing or eliminating said symptoms. For example, treating cancer includes preventing or slowing the growth and/or division of cancer cells as well as killing cancer cells.

[0042] As used herein, the term “antibody” refers to a polyclonal or monoclonal antibody or a binding fragment thereof such as Fab, F(ab′)₂ and Fv fragments. Antibodies as disclosed herein include, but are not limited to, monoclonal, multispecific, human or chimeric antibodies, single chain antibodies, Fab fragments, F(ab′) fragments, anti-idiotypic (anti-Id)antibodies (including, e.g., anti-Id antibodies to antibodies of the invention), intracellularly-made antibodies (i.e., intrabodies), and epitope-binding fragments of any of the above. The immunoglobulin molecules of the invention can be of any type (e.g., IgG, IgE, IgM, IgD, IgA and IgY), class (e.g., IgG1, IgG2, IgG3, IgG4, IgA1 and IgA2) or subclass of immunoglobulin molecule

[0043] As used herein, the term “biologically active fragments” of the antibodies described herein encompasses natural or synthetic portions of the respective full-length antibody that retain the capability of specific binding to the target epitope.

[0044] As used herein, the term “parenteral” includes administration subcutaneously, intravenously or intramuscularly.

[0045] As used herein the characterization of expression level such as “high expression” is based on the parameters established in Perna et al., Cancer Cell 32, 506-519. Oct. 9, 2017, the teachings of which are expressely incorporated herein. By merging 3 proteomic databases a cut-off for low medium and high expression was established and was used in the context of the present invention.

### EMBODIMENTS

[0046] The present disclosure is based on applicant's analysis of the expression of cell surface candidate targets in MM. Biotinylation of the surface proteins of 7 different MM cell lines followed by Spectrometry analysis led to the identification of 5,454 uniprot IDs corresponding to 4761 proteins. As detailed in FIG. 1B an integrated database was used to generate cell surface molecule annotation. A combination of cell surface molecule annotation and exclusion based on expression levels (see FIGS. 1C and 1D) identified 326 surface proteins for further analysis by STRING.

[0047] A heatmap reveals the protein annotation of 94 selected targets in several normal tissues and organs of the whole body. These molecules were selected by merging the Human Protein Atlas, Human Protein Map and Proteomics database as previously reported (Perna F et al., Cancer Cell 2017). Molecules with high expression in any normal tissue except hematopoietic tissues were excluded. Molecules with available annotation in less than 2 out of the 3 proteomic databases were excluded. The 94 targets include the cell surface polypeptides IL12RB1, SLC5A3, CCR1, ANKH, IL27RA, S1PR4, TLR1, KCNA3, PSEN2, BCMA, IL2RG, LILRB4, IL6R, ITGB7, LRP10, FCRL3, IFNGR1, SLAMF6, SLCO3A1, LILRB1, PLXNA3, SLC17A5, CD28, LAX1, NEMP1, TMEM154, SEMA4A, C10orf54, ITM2C, LY9, SLAMF7, ITGA4, LRRC8A, LRRC8D, CD320, KCNN4, PLXNC1, CD37, SELPLG, DAGLB, ABCC4, ADAMS, CD4, CD180, CD48, CD40, MCUR1, ABCC5, IL6ST, LRP8, SLC5A6, SLC7A6, HLA-F, ICAM2, LEPROT, ITGAL, TMEM63A, CMTM7, IL10RB, NDC1, PTPRCAP, ANTXR2, ABCA7, FCGR2B, ACVR1B, STS, ABHD12, TNFRSF10A, HVCN1, SLC39A10, EMP3, ABCC1, SLC26A6, SLC6A6, CCR10, SLC30A1, SLC231A1, ADCY3, IFNAR1, PTPRJ, CLDND1, SLC30A5, SLC6A9, ADAM15, IGF2R, INSR, NOTCH2, CD53, SLC12A9, SLC15A4, CEMIP2, ADAM17, MPZL1 and TACI.

[0048] A Venn Diagram overlapping the targets with a potential biological relevance (227 molecules involved in immune-related pathways) and therapeutic relevance (94 molecules with minimal expression in normal tissues) revealed 67 common targets (see FIG. 3). 24 out of those 67 targets presented the most favorable expression profile in primary patients and were used for validation in patient samples including: CCR1, CD28, CD320, FCRL3, IFNGR1, IL12RB1. IL27RA. IL2RG, IL6R, ITGA4, KCNN4, LAX1, LILRB1, LILRB4, LRRC8A, LRRC8D, PLXNA3, PLXNC1, S1PR4, SELPLG, SEMA4A, SLAMF6, TLR1 and BCMA.

[0049] Further analysis as described in Example 2 has further identified the following 12 genes that encode products that in some aspects are targets for the generation of immunotherapeutics: CCR1 (SEQ ID NO: 156), CD320 (SEQ ID NO: 157), FCRL3(SEQ ID NO: 158), IFNGR1 (SEQ ID NO: 159), IL12RB1 (SEQ ID NO: 160), ITGA4 (SEQ ID NO: 161), LAX1 (SEQ ID NO: 162), LILRB4 (SEQ ID NO: 163), LRRC8D (SEQ ID NO: 164), SEMA4A (SEQ ID NO: 165), SLAMF6 (SEQ ID NO: 166), and TNFRSF17 (SEQ ID NO: 167).

[0050] Western Blot analysis identified the expression of 11 selected targets in in 25 MM patients relative to normal cord blood CD34+ cells revealing these proteins to be of particular interest as targets. BCMA was used as a control. VCP was used as loading control. Specifically, the identified proteins include IL12RB1, CCR1, LILRB4, FCRL3, IFNGR1, SLAMF6, LAX1, SEMA4A, ITGA4, LRRC8D and CD320 by western blot analysis.

[0051] In accordance with at least one embodiment Mass-Spectrometer analysis reveals 5,454 Uniprot ID and MMRF Compass revealed 16,462 transcripts. Common targets of this analysis revealed a total of 401 proteins with surface score greater than or equal to (=>) 3. Overlap with high expressors (average expression is greater than (>) median) in primary patient samples (MMRF) was determined and the average expression of each gene was calculated; low expressing genes (1 SD below the mean) were removed and genes having expression over the cutoff were selected identifying 326 surface proteins.

[0052] Annotation in normal tissues from at least 2 out of 3 databases (HPA, HPM and PDB) and exclusion of proteins with high expression in any tissue except hematopoietic tissues identified 94 out of the 326 targets. Analysis of immune-related+therapeutic value reduced this number to 67 targets. Analysis in high-risk cytogenetics excluded targets with decreased expression in standard risk vs high-risk and validation in primary MM samples produce 11 targets identified as CCR1 (SEQ ID NO: 156), CD320 (SEQ ID NO: 157), FCRL3 (SEQ ID NO: 158), IFNGR1 (SEQ ID NO: 159), IL12RB1 (SEQ ID NO: 160), ITGA4 (SEQ ID NO: 161), LAX1 (SEQ ID NO: 162), LILRB4 (SEQ ID NO: 163), LRRC8D (SEQ ID NO: 164), SEMA4A (SEQ ID NO: 165), and SLAMF6 (SEQ ID NO: 166).

[0053] In accordance with at least one embodiment an antibody is provided that specifically binds to a polypeptide comprising a sequence selected from the group consisting of SEQ ID NO: 1-155. In some embodiments an antibody is provided that specifically binds to a polypeptide comprising a sequence selected from the group consisting of (SEQ ID NO: 156), (SEQ ID NO: 157), (SEQ ID NO: 158), (SEQ ID NO: 159), (SEQ ID NO: 160), (SEQ ID NO: 161), (SEQ ID NO: 162), (SEQ ID NO: 163), (SEQ ID NO: 164), (SEQ ID NO: 165), and (SEQ ID NO: 166). Such antibodies can be linked to detectable markers for diagnostic purposes. Alternatively, the antibodies can be linked to cytotoxic agents and the conjugated antibodies can be administered to patients for targeted delivery of cytotoxins to MM cells.

[0054] In at least one embodiment antibodies generated against the peptides disclosed in Table 1 (SEQ ID NO: 1-155), or a polypeptide comprising a sequence selected from the group consisting of (SEQ ID NO: 156), (SEQ ID NO: 157), (SEQ ID NO: 158), (SEQ ID NO: 159), (SEQ ID NO: 160), (SEQ ID NO: 161), (SEQ ID NO: 162), (SEQ ID NO: 163), (SEQ ID NO: 164), (SEQ ID NO: 165), and (SEQ ID NO: 166) can be used to generate an antibody single-chain variable fragment which can then be used to prepare a chimeric antigen receptor (CAR). The antibody single-chain variable fragment is a chimeric protein made up of the light (VL) and heavy (VH) chains of immunoglobins, connected with a short linker peptide. In accordance with the present disclosure the VL and VH regions are selected in advance for their binding ability to a target antigen selected from the polypeptides of SEQ ID NO: 1-155, or a polypeptide comprising a sequence selected from the group consisting of (SEQ ID NO: 156), (SEQ ID NO: 157), (SEQ ID NO: 158), (SEQ ID NO: 159), (SEQ ID NO: 160), (SEQ ID NO: 161), (SEQ ID NO: 162), (SEQ ID NO: 163), (SEQ ID NO: 164), (SEQ ID NO: 165), and (SEQ ID NO: 166). In some embodiments the linker between the VL and VH regions consists of hydrophilic residues with stretches of glycine and serine in it for flexibility as well as stretches of glutamate and lysine for added solubility.

[0055] In some aspects, the antibody single-chain variable fragment can then be covalently linked to an intracellular immune cell signaling domain typically through a transmembrane domain to create a chimeric antigen receptor (CAR). In some aspects, the immune cell signaling domain can be a T-cell, NK cell, macrophage, and/or a myeloid cell. For example, in some aspects, the antibody single-chain variable fragment can then be covalently linked to an intracellular T-cell signaling domain typically through a transmembrane domain to create a chimeric antigen receptor (CAR). Such CARs when expressed in immune cells such as T-cells, NK cells, macrophages, and/or a myeloid cells can provide the immune cells a new ability to target a specific protein. Accordingly, CAR T-cells, NK cells, macrophages, and/or myeloid cells comprising CARs that specifically bind to polypeptides selected from the group consisting of SEQ ID NO: 1-155, or a polypeptide comprising a sequence selected from the group consisting of (SEQ ID NO: 156), (SEQ ID NO: 157), (SEQ ID NO: 158), (SEQ ID NO: 159), (SEQ ID NO: 160), (SEQ ID NO: 161), (SEQ ID NO: 162), (SEQ ID NO: 163), (SEQ ID NO: 164), (SEQ ID NO: 165), and (SEQ ID NO: 166) can be used to treat MM patients. In particular, in some embodiments CAR T-cells are prepared by isolating the patient's own cells and transforming T-cells with nucleic acid sequences encoding CAR having specificity to a polypeptide selected from the group consisting of SEQ ID NO: 1-155. In particular, in some embodiments the CAR T-cells are prepared by providing allogeneic T-cells and transforming T-cells with nucleic acid sequences encoding CAR having specificity to a polypeptide selected from the group consisting of SEQ ID NO: 1-155, 156-167, and 168-208, and optionally selected from the group consisting of (SEQ ID NO: 156), (SEQ ID NO: 157), (SEQ ID NO: 158), (SEQ ID NO: 159), (SEQ ID NO: 160), (SEQ ID NO: 161), (SEQ ID NO: 162), (SEQ ID NO: 163), (SEQ ID NO: 164), (SEQ ID NO: 165), and (SEQ ID NO: 166). It is understood that for any of the above cell types, either autologous or allogeneic approaches may be utilized. In accordance with embodiments, the method of treating a patient with MM comprises administering 1, 2, 3, 4, 5 or more CAR T-cells, CAR NK cells, CAR macrophages, and/or CAR myeloid cells to a MM patient in need to therapy, wherein each of the CAR T-cells targets a different antigen present on a polypeptide selected from the group consisting of SEQ ID NO: 1-155, or a polypeptide comprising a sequence selected from the group consisting of (SEQ ID NO: 156), (SEQ ID NO: 157), (SEQ ID NO: 158), (SEQ ID NO: 159), (SEQ ID NO: 160), (SEQ ID NO: 161), (SEQ ID NO: 162), (SEQ ID NO: 163), (SEQ ID NO: 164), (SEQ ID NO: 165), and (SEQ ID NO: 166).

[0056] In accordance with at least one embodiment an antibody is provided that specifically binds to a gene product of CCR1 (SEQ ID NO: 156), CD320 (SEQ ID NO: 157), FCRL3(SEQ ID NO: 158), IFNGR1 (SEQ ID NO: 159), IL12RB1 (SEQ ID NO: 160), ITGA4 (SEQ ID NO: 161), LAX1 (SEQ ID NO: 162), LILRB4 (SEQ ID NO: 163), LRRC8D (SEQ ID NO: 164), SEMA4A (SEQ ID NO: 165), SLAMF6 (SEQ ID NO: 166), and TNFRSF17 (SEQ ID NO: 167). In one embodiment an antibody is provided that specifically binds to a polypeptide comprising a sequence selected from the group consisting of SEQ ID NO: 168-208. Such antibodies can be linked to detectable markers for diagnostic purposes. Alternatively, the antibodies can be linked to cytotoxic agents and the conjugated antibodies can be administered to patients for targeted delivery of cytotoxins to MM cells.

[0057] In some embodiments antibodies generated against the peptides disclosed in Table 1 (SEQ ID NO: 168-208) can be used to generate an antibody single-chain variable fragment which can then be used to prepare a chimeric antigen receptor (CAR). The antibody single-chain variable fragment is a chimeric protein made up of the light (VL) and heavy (VH) chains of immunoglobins, connected with a short linker peptide. In accordance with the present disclosure the VL and VH regions are selected in advance for their binding ability to a target antigen selected from the polypeptides of SEQ ID NO: 168-208. In one embodiment the linker between the VL and VH regions consists of hydrophilic residues with stretches of glycine and serine in it for flexibility as well as stretches of glutamate and lysine for added solubility.

[0058] The antibody single-chain variable fragment can then be covalently linked to an intracellular T-cell signaling domain typically through a transmembrane domain to create a chimeric antigen receptor (CAR). Such CARs when expressed in T-cells can provide T cells a new ability to target a specific protein. Accordingly, CAR T-cells comprising CARs that specifically bind to polypeptides selected from the group consisting of SEQ ID NO: 168-208 can be used to treat MM patients. In particular, in some embodiments the CAR T-cells are prepared by isolating the patient's own cells and transforming T-cells with nucleic acid sequences encoding CAR having specificity to a polypeptide selected from the group consisting of SEQ ID NO: 168-208. In accordance with one embodiment the method of treating a patient with MM comprises administering 1, 2, 3, 4, 5 or more CAR T-cells to a MM patient in need to therapy, wherein each of the CAR T-cells targets a different antigen present on a polypeptide selected from the group consisting of SEQ ID NO: 168-208.

[0059] In accordance with one embodiment the transmembrane domain of the CARs of the present disclosure comprises a hydrophobic alpha helix that spans the cell membrane. It anchors the CAR to the plasma membrane, bridging the extracellular antigen recognition domains (i.e., antibody single-chain variable fragment) with the intracellular signaling region. In one embodiment the CAR further comprises a hinge region located between the antigen recognition domains and the transmembrane domain. The ideal hinge enhances the flexibility of the scFv receptor head, reducing the spatial constraints between the CAR and its target antigen. This promotes antigen binding and synapse formation between the CAR-T cells and target cells. In one embodiment the hinge sequences is based on membrane-proximal regions from other immune molecules including IgG, CD8, and CD28.

[0060] The intracellular T-cell signaling domain of the CAR when expressed a cell will remain inside the cell. After an antigen is bound to the external antigen recognition domain, CAR receptors cluster together and transmit an activation signal. Then the internal cytoplasmic end of the receptor perpetuates signaling inside the T cell. Normal T cell activation relies on the phosphorylation of immunoreceptor tyrosine-based activation motifs (ITAMs) present in the cytoplasmic domain of CD3-zeta. To mimic this process, in one embodiment the CARS of the present disclosure comprise the CD3-zeta's cytoplasmic domain as the main CAR endodomain component.

[0061] T cells also require co-stimulatory molecules in addition to CD3 signaling in order to persist after activation. In a further embodiment, the endodomains of CAR receptors also include one or more chimeric domains from co-stimulatory proteins known to those skilled in the art. Signaling domains from a wide variety of co-stimulatory molecules have been successfully tested, including CD28, CD27, CD134 (OX40), and CD137. In a further embodiment co-stimulatory domains, like CD28 or 4-1BB, CD28-41BB or CD28-OX40, and cytokines, such is IL-2, IL-5, IL-12 can be added to the endodomains of CAR receptors to augment T cell activity.

[0062] In accordance with embodiment 1, a method for identifying target multiple myeloma associated surface antigens is provided wherein said method comprises

[0063] identifying a plurality of genes that express cell-surface proteins in a first multiple myeloma sample and a second multiple myeloma sample;

[0064] selecting nucleic acids from said first multiple myeloma sample that have expression levels higher than a control gene unrelated to hematopoietic cells, and identifying the proteins corresponding to the detected elevated expressed nucleic acids to designate a first pool of selected proteins;

[0065] conducting mass spec analysis on proteins isolated from said second myeloma sample to identify proteins that are present in higher concentration in said second multiple myeloma relative to normal tissues, wherein such proteins represent a second pool of selected proteins;

[0066] excluding proteins with high expression in brain, spinal cord, gut, liver and kidney from said first and second pools to produce a modified first and second pool of proteins; and

[0067] identifying proteins common to said first and second modified pool of proteins as target multiple myeloma associated surface antigens.

[0068] In accordance with embodiment 2, the method of embodiment 1 is provided wherein said first multiple myeloma sample and a second multiple myeloma sample are taken from the same tissue source.

[0069] In accordance with embodiment 3, the method of embodiment 1 is provided wherein said first multiple myeloma sample is a nucleic acid pool of expressed genes from MM patients and the second multiple myeloma sample represents proteins expressed in MM cell lines.

[0070] In accordance with embodiment 4, the method of any one of embodiments 1-3 is provided wherein the target multiple myeloma associated surface antigen has an expression level in a normal tissue sample that is more than about one standard deviation below the normal peak of the protein expression level distribution of the normal tissue sample.

[0071] In accordance with embodiment 5, the method of any one of embodiments 1˜4 wherein mRNA is measured to determine the expression level of the nucleic acids used to identify proteins for the first pool of selected proteins.

[0072] In accordance with embodiment 6, the method of any one of embodiments 1-5 is provided wherein proteins are identified as cell surface proteins based on the use of an integrative computational tool assigning a score relative to five published databases disclosed in Example 2.

[0073] In accordance with embodiment 7, the method of any one of embodiments 1-5 is provided wherein said first pool of proteins is identified by

[0074] analyzing an RNA-seq dataset from Multiple Myeloma patients to identify surface targets based on the use of an integrative computational tool assigning a score relative to five published databases disclosed in Example 2;

[0075] removing low expressing genes (1 SD below the mean); and

[0076] excluding proteins with high expression in any normal tissue except hematopoietic tissues; wherein the remaining proteins constitute said first pool of proteins.

[0077] In accordance with embodiment 8, a method for identifying target multiple myeloma associated surface antigens is provided wherein said method comprises

[0078] analyzing an RNA-seq dataset from Multiple Myeloma patients to identify surface targets based on the use of an integrative computational tool assigning a score relative to five published databases disclosed in Example 2;

[0079] removing low expressing genes (1 SD below the mean); and

[0080] excluding proteins with high expression in any normal tissue except hematopoietic tissues; wherein the remaining proteins constitute target multiple myeloma associated surface antigens.

[0081] In accordance with embodiment 9, a monoclonal antibody that specifically binds to a polypeptide selected from the group consisting of SEQ ID NO: 1-155 or 168-208 is provided or a monoclonal antibody that specifically binds to a polypeptide having at least 90, 95, or 99% sequence identity with a polypeptide selected from the group consisting of SEQ ID NO: 1-155 or 168-208.

[0082] In accordance with embodiment 10, the monoclonal antibody of embodiment 9 is provided wherein the antibody specifically binds to a polypeptide selected from the group consisting of SEQ ID NO: 168-208.

[0083] In accordance with embodiment 11, the monoclonal antibody of embodiment 9 is provided wherein the antibody specifically binds to a polypeptide selected from the group consisting of SEQ ID NO: 19, SEQ ID NO: 20, SEQ ID NO: 37, SEQ ID NO: 42, SEQ ID NO: 54, SEQ ID NO: 56, SEQ ID NO: 57, SEQ ID NO: 79, SEQ ID NO: 112 and SEQ ID NO: 104.

[0084] In accordance with embodiment 12, the monoclonal antibody of any one of embodiments 9-11 is provided wherein the antibody specifically binds to a polypeptide having at least 90% sequence identity to a sequence selected from the group consisting of CCR1 (SEQ ID NO: 60), CD320 (SEQ ID NO: 56), FCRL3(SEQ ID NO: 57), IFNGR1 (SEQ ID NO: 79), IL12RB1 (SEQ ID NO: 19), ITGA4 (SEQ ID NO: 42), LILRB4 (SEQ ID NO: 20), LRRC8D (SEQ ID NO: 112), SEMA4A (SEQ ID NO: 104), and SLAMF6 (SEQ ID NO: 37).

[0085] In accordance with embodiment 13, the monoclonal antibody of any one of embodiments 9-12 is provided wherein the antibody specifically binds to a polypeptide having at least 90% sequence identity to a sequence selected from the group consisting of SEQ ID NO: 1-155 or 168-208.

[0086] In accordance with embodiment 14, the monoclonal antibody of any one of embodiments 9-12 is provided wherein the antibody specifically binds to a polypeptide having at least 95% sequence identity to a sequence selected from the group consisting of SEQ ID NO: 1-155 or 168-208.

[0087] In accordance with embodiment 15, the monoclonal antibody of any one of embodiments 9-14 is provided wherein said antibody further comprises a detectable label covalently linked to the antibody.

[0088] In accordance with embodiment 16, the monoclonal antibody of any one of embodiments 9-14 is provided wherein said antibody further comprises a cytotoxic agent linked to the antibody.

[0089] In accordance with embodiment 17, a chimeric antigen receptor (CAR) is provided comprising an antibody of any one of embodiments 9-15, or antigen binding fragment thereof;

[0090] a transmembrane domain; and

[0091] an immune cell antigen receptor chain, wherein the transmembrane domain links the an antibody, or antigen binding fragment thereof to the immune cell antigen receptor chain.

[0092] In accordance with embodiment 18, a chimeric antigen receptor of embodiment 17 is provided wherein the antibody or antigen binding fragment thereof, specifically binds to a polypeptide selected from the group consisting of SEQ ID NO: 168-208.

[0093] In accordance with embodiment 19, a chimeric antigen receptor of embodiment 17 is provided wherein the antibody or antigen binding fragment thereof, specifically binds to a polypeptide having at least 95% sequence identity to a sequence selected from the group consisting of CCR1 (SEQ ID NO: 60), CD320 (SEQ ID NO: 56), FCRL3(SEQ ID NO: 57), IFNGR1 (SEQ ID NO: 79), IL12RB1 (SEQ ID NO: 19), ITGA4 (SEQ ID NO: 42), LILRB4 (SEQ ID NO: 20), LRRC8D (SEQ ID NO: 112), SEMA4A (SEQ ID NO: 104) and SLAMF6 (SEQ ID NO: 37).

[0094] In accordance with embodiment 20, a chimeric antigen receptor of embodiment 17 is provided wherein the antibody, or antigen binding fragment thereof, binds one or more epitopes of a polypeptide having at least 90% homology to a sequence selected from the group consisting of SEQ ID NO: 1-155 or 168-208.

[0095] In accordance with embodiment 21, a chimeric antigen receptor of embodiment 17 is provided wherein the antibody, or antigen binding fragment thereof, binds one or more epitopes of a polypeptide having at least 95% homology to a sequence selected from the group consisting of SEQ ID NO: 1-155 or 168-208.

[0096] In accordance with embodiment 22, a chimeric antigen receptor of embodiment 17 is provided wherein the antibody or antigen binding fragment thereof, specifically binds to a polypeptide selected from the group consisting of SEQ ID NO: 19, SEQ ID NO: 20, SEQ ID NO: 37, SEQ ID NO: 42, SEQ ID NO: 54, SEQ ID NO: 56, SEQ ID NO: 57, SEQ ID NO: 79, SEQ ID NO: 112 and SEQ ID NO: 104.

[0097] In accordance with embodiment 23, a chimeric antigen receptor of any one of embodiments 17-22 is provided wherein said antibody or antigen binding fragment comprises an antibody single-chain variable fragment.

[0098] In accordance with embodiment 24, a chimeric antigen receptor of embodiment 23 is provided further comprising a hinge region located between the antibody single-chain variable fragment and the transmembrane domain.

[0099] In accordance with embodiment 25, a T-cell modified to express the chimeric antigen receptor of any one of embodiments 16-23 is provided.

[0100] In accordance with embodiment 26, the T-cell of embodiment 25 is provided wherein the T-cell is a tumor infiltrating leukocyte.

[0101] In accordance with embodiment 27, an NK cell modified to express the chimeric antigen receptor of any one of embodiments 17-24 is provided.

[0102] In accordance with embodiment 28, a myeloid cell modified to express the chimeric antigen receptor of any one of embodiments 17-24 is provided.

[0103] In accordance with embodiment 29, a macrophage modified to express the chimeric antigen receptor of any one of embodiments 17-24 is provided.

[0104] In accordance with embodiment 30, T-cell of embodiment 25 or 26 is provided wherein the T-cell antigen receptor chain is the CD3ζ chain (zeta-chain).

[0105] In accordance with embodiment 31 a pharmaceutical composition comprising the antibody of any one of embodiments 9-16, chimeric antigen receptor of any one of embodiments 17-24, the T-cell of embodiments 25 or 26, the NK cell of embodiment 27, the myeloid cell of embodiment 28 or the macrophage of embodiment 29.

[0106] In accordance with embodiment 32 a method for treating multiple myeloma is provided wherein said method comprises administering the pharmaceutical composition of embodiment 31 to a patient in need of such treatment.

[0107] In accordance with embodiment 33 an isolated immunoresponsive cell is provided wherein the cell comprises an antigen recognizing receptor that binds to an antigen present on a polypeptide selected from the group consisting of CCR1 (SEQ ID NO: 60), CD320 (SEQ ID NO: 56), FCRL3(SEQ ID NO: 57), IFNGR1 (SEQ ID NO: 79), IL12RB1 (SEQ ID NO: 19), ITGA4 (SEQ ID NO: 42), LILRB4 (SEQ ID NO: 20), LRRC8D (SEQ ID NO: 112), SEMA4A (SEQ ID NO: 104), and SLAMF6 (SEQ ID NO: 37) or a polypeptide having 90, 95 or 99% sequence identity to any of said proteins.

[0108] In accordance with embodiment 34 an isolated immunoresponsive cell of embodiment 33 is provided wherein the antigen is present on a polypeptide selected from the group consisting of IL12RB1 (SEQ ID NO: 19), LILRB4 (SEQ ID NO: 20), SLAMF6 (SEQ ID NO: 37), CCR1 (SEQ ID NO: 60), and CD320 (SEQ ID NO: 56).

[0109] In accordance with embodiment 35 an isolated immunoresponsive cell of embodiment 33 or 34 is provided wherein said antigen recognizing receptor is a T cell receptor (TCR), or a chimeric antigen receptor (CAR).

[0110] In accordance with embodiment 36 an isolated immunoresponsive cell of embodiment 35 is provided wherein said antigen recognizing receptor is a CAR.

[0111] In accordance with embodiment 37 an isolated immunoresponsive cell of embodiment 36 is provided wherein the intracellular signaling domain of said CAR is the CD3C-chain, CD97, CD1 la-CD 18, CD2, ICOS, CD27, CD 154, CD8, OX40, 4-IBB, CD28 signaling domain, or combinations thereof.

[0112] In accordance with embodiment 38 an isolated immunoresponsive cell of any one of embodiments 33-37 is provided wherein the cell is selected from the group consisting of a T cell, a Natural Killer (NK) cell, a cytotoxic T lymphocyte (CTL), a regulatory T cell, a Natural Killer T (NKT) cell, a human embryonic stem cell, and a pluripotent stem cell from which lymphoid cells may be differentiated.

[0113] In accordance with embodiment 39 an isolated immunoresponsive cell is provided comprising:

(a) a first antigen recognizing receptor that binds to a first antigen, and
(b) a second antigen recognizing receptor that binds to a second antigen, wherein each of the first antigen and the second antigen is selected from the group consisting of CCR1 (SEQ ID NO: 60), CD320 (SEQ ID NO: 56), FCRL3(SEQ ID NO: 57), IFNGR1 (SEQ ID NO: 79), IL12RB1 (SEQ ID NO: 19), ITGA4 (SEQ ID NO: 42), LILRB4 (SEQ ID NO: 20), LRRC8D (SEQ ID NO: 112), SEMA4A (SEQ ID NO: 104), and SLAMF6 (SEQ ID NO: 37), and the first antigen and the second antigen are different.

[0114] In accordance with embodiment 40 an isolated immunoresponsive cell of embodiment 37 is provided, wherein each of said antigen recognizing receptor is a T cell receptor (TCR) or a chimeric antigen receptor (CAR), optionally wherein the said antigen recognizing receptor is a CAR.

[0115] In accordance with embodiment 41 a method of reducing tumor burden in a subject is provided, comprising administering to the subject an effective amount of the immunoresponsive cell of any one of embodiments 33-40.

### Example 1

### Surface Biotinylation and MS Analysis

[0116] As multiple myeloma is characterized by significant molecular heterogeneity, 7 known and distinct MM cell lines were selected for additional analysis. The 7 cell lines are: OPM-2 bearing p53 mutation and t(4;14), NCI-H929 with t(4;14) and 8q+, JJN3 with t(14;16) and t(8;14), KMS11 with p53 null and t(4;14), t(14;16) and t(8;14), U266 p53 mut and t(11;14), AMO-1 with p53 WT and t(12;14) and RPMI-8226 with p53 mut, t(16;22), t(8;22) and KRas mut as disclosed in Table 1.

TABLE 1
MM cell lines used for Mass-Spectrum analysis

| | | | BCMA | |
|---|---|---|---|---|
| | | | expression level | TP53 |
| | Cell Lines | Molecular Genetics | (flow cytometry) | status |
| 1 | OPM-2 | t(4; 14) | +++ | Mut |
| 2 | NCI-H929 | t(4; 14) + 8q+ | +++ | WT |
| 3 | JJN3 | t(14; 16) + t(8; 14) | ++ (60%) | +/− |
| 4 | KMS11 | t(4; 14) + t(14; 16) + t(8; | +++ | Null |
| | | 14) | | |
| 5 | U266 | t(11; 14) | +++ | Mut |
| 6 | AMO-1 | t(12; 14) | +++ | WT |
| 7 | RPMI-8226 | t(16; 22) + t(8; 22) | +++ | Mut |

[0117] Surface-specific proteomic analyses of these seven multiple myeloma cell lines bearing distinct genetic abnormalities was conducted using biotin labeling followed by Mass-Spectrometry analysis (MS). Cell surface proteins were labeled with biotin on live cells; biotin-tagged proteins were then captured on avidin beads, digested with trypsin and analyzed by Mass-Spectrometry and data independent annotation (DIA).

[0118] More particularly, labeling with biotin was conducted using procedures to ensure that only surface proteins were exposed to the biotinylation reagents. Pierce® Cell Surface Protein Biotinylation and isolation Kit (Thermo Fisher, A44390) was used for labeling and isolation of surface proteins. Briefly, the cells were incubated with the membrane-impermeable Sulfo-NHS-SS-biotin reagent for 10 min at RT, after the incubation excess labeling reagent was removed and the cells were washed several times to remove any unbound labeling reagent before lysis. Biotinylated proteins were captured on Neutravidin resin, and any non-specific bound unbiotinylated proteins were removed by repetitive washing of the resins. Prior to MS analysis, the bound biotinylated proteins on the Neutravidin resins were released from the resin by trypsin cleavage overnight. The digested peptides were desalted and purified using StageTip, desalted peptides were analyzed by LC-MS/MS using 170 mins LC gradient and DIA method on Orbitrap Fusion. Samples specific library (SSL) was generated using equal amount of digested proteins from each sample. MS Raw data were searched with SSL using Spectronaut software. Protein expression quantification was done using Label Free Quantification (LFQ). This generated an unbiased pool of 5,454 Uniprot IDs corresponding to 4,761 proteins (FIG. 1A). Table 2 155 proteins identified by Mass spec analysis.

TABLE 2

| | | Protein |
|---|---|---|
| Protein Name | Gene Name | Sequence |
| Anthrax toxin receptor 2 (Capillary | ANTXR2 CMG2 | SEQ ID NO: 1 |
| morphogenesis gene 2 protein) (CMG-2) | | |
| C-type lectin domain family 1 member A (C- | CLEC1A CLEC1 | SEQ ID NO: 2 |
| type lectin-like receptor 1) (CLEC-1) | UNQ569/PRO1131 | |
| T-cell-specific surface glycoprotein CD28 | CD28 | SEQ ID NO: 3 |
| (TP44) (CD antigen CD28) | | |
| Complement receptor type 2 (Cr2) | CR2 C3DR | SEQ ID NO: 4 |
| (Complement C3d receptor) (Epstein-Barr | | |
| virus receptor) (EBV receptor) (CD antigen | | |
| CD21) | | |
| T-cell surface glycoprotein CD8 beta chain | CD8B CD8B1 | SEQ ID NO: 5 |
| (CD antigen CD8b) | | |
| Y + L amino acid transporter 2 (Cationic | SLC7A6 KIAA0245 | SEQ ID NO: 6 |
| amino acid transporter, y+ system) (Solute | | |
| carrier family 7 member 6) (y(+)L-type | | |
| amino acid transporter 2) (Y + LAT2) (y + LAT- | | |
| 2) | | |
| Solute carrier family 52, riboflavin | SLC52A2 GPR172A | SEQ ID NO: 7 |
| transporter, member 2 (Porcine | PAR1 RFT3 | |
| endogenous retrovirus A receptor 1) (PERV- | | |
| A receptor 1) (Protein GPR172A) (Riboflavin | | |
| transporter 3) (hRFT3) | | |
| Tumor necrosis factor receptor superfamily | CD40 TNFRSF5 | SEQ ID NO: 8 |
| member 5 (B-cell surface antigen CD40) | | |
| (Bp50) (CD40L receptor) (CDw40) (CD | | |
| antigen CD40) | | |
| Sodium-coupled neutral amino acid | SLC38A1 ATA1 NAT2 | SEQ ID NO: 9 |
| transporter 1 (Amino acid transporter A1) | SAT1 SNAT1 | |
| (N-system amino acid transporter 2) | | |
| (Solute carrier family 38 member 1) | | |
| (System A amino acid transporter 1) | | |
| (System N amino acid transporter 1) | | |
| T-cell surface glycoprotein CD4 (T-cell | CD4 | SEQ ID NO: 10 |
| surface antigen T4/Leu-3) (CD antigen CD4) | | |
| Leukocyte antigen CD37 (Tetraspanin-26) | CD37 TSPAN26 | SEQ ID NO: 11 |
| (Tspan-26) (CD antigen CD37) | | |
| CD180 antigen (Lymphocyte antigen 64) | CD180 LY64 RP105 | SEQ ID NO: 12 |
| (Radioprotective 105 kDa protein) (CD | | |
| antigen CD180) | | |
| Adhesion G protein-coupled receptor E2 | ADGRE2 EMR2 | SEQ ID NO: 13 |
| (EGF-like module receptor 2) (EGF-like | | |
| module-containing mucin-like hormone | | |
| receptor-like 2) (CD antigen CD312) | | |
| Myeloid cell surface antigen CD33 (Sialic | CD33 SIGLEC3 | SEQ ID NO: 14 |
| acid-binding Ig-like lectin 3) (Siglec-3) | | |
| (gp67) (CD antigen CD33) | | |
| Phospholipid-transporting ATPase ABCA7 | ABCA7 | SEQ ID NO: 15 |
| (EC 7.6.2.1) (ABCA-SSN) (ATP-binding | | |
| cassette sub-family A member 7) | | |
| (Autoantigen SS-N) (Macrophage ABC | | |
| transporter) | | |
| Sodium-dependent multivitamin | SLC5A6 SMVT | SEQ ID NO: 16 |
| transporter (Na(+)-dependent multivitamin | | |
| transporter) (Solute carrier family 5 | | |
| member 6) | | |
| Leukosialin (GPL115) (Galactoglycoprotein) | SPN CD43 | SEQ ID NO: 17 |
| (GALGP) (Leukocyte sialoglycoprotein) | | |
| (Sialophorin) (CD antigen CD43) [Cleaved | | |
| into: CD43 cytoplasmic tail (CD43-ct) | | |
| (CD43ct)] | | |
| Integrin alpha-L (CD11 antigen-like family | ITGAL CD11A | SEQ ID NO: 18 |
| member A) (Leukocyte adhesion | | |
| glycoprotein LFA-1 alpha chain) (LFA-1A) | | |
| (Leukocyte function-associated molecule 1 | | |
| alpha chain) (CD antigen CD11a) | | |
| Interleukin-12 receptor subunit beta-1 (IL- | IL12RB1 IL12R | SEQ ID NO: 19 |
| 12 receptor subunit beta-1) (IL-12R subunit | IL12RB | |
| beta-1) (IL-12R-beta-1) (IL-12RB1) (IL-12 | | |
| receptor beta component) (CD antigen | | |
| CD212) | | |
| Leukocyte immunoglobulin-like receptor | LILRB1 ILT2 LIR1 | SEQ ID NO: 20 |
| subfamily B member 1 (LIR-1) (Leukocyte | MIR7 | |
| immunoglobulin-like receptor 1) (CD85 | | |
| antigen-like family member J) | | |
| (Immunoglobulin-like transcript 2) (ILT-2) | | |
| (Monocyte/macrophage immunoglobulin- | | |
| like receptor 7) (MIR-7) (CD antigen CD85j) | | |
| T-lymphocyte surface antigen Ly-9 (Cell | LY9 CDABP0070 | SEQ ID NO: 21 |
| surface molecule Ly-9) (Lymphocyte | | |
| antigen 9) (SLAM family member 3) | | |
| (SLAMF3) (Signaling lymphocytic activation | | |
| molecule 3) (CD antigen CD229) | | |
| Disintegrin and metalloproteinase domain- | ADAM28 ADAM23 | SEQ ID NO: 22 |
| containing protein 28 (ADAM 28) (EC | MDCL | |
| 3.4.24.-) (Epididymal metalloproteinase- | | |
| like, disintegrin-like, and cysteine-rich | | |
| protein II) (eMDC II) (Metalloproteinase- | | |
| like, disintegrin-like, and cysteine-rich | | |
| protein L) (MDC-L) | | |
| Epithelial membrane protein 3 (EMP-3) | EMP3 YMP | SEQ ID NO: 23 |
| (Hematopoietic neural membrane protein | | |
| 1) (HNMP-1) (Protein YMP) | | |
| Low-density lipoprotein receptor-related | LRP10 MSTP087 | SEQ ID NO: 24 |
| protein 10 (LRP-10) | SP220 | |
| | UNQ389/PRO724 | |
| Receptor-type tyrosine-protein | PTPRC CD45 | SEQ ID NO: 25 |
| phosphatase C (EC 3.1.3.48) (Leukocyte | | |
| common antigen) (L-CA) (T200) (CD antigen | | |
| CD45) | | |
| Cytokine receptor common subunit gamma | IL2RG | SEQ ID NO: 26 |
| (Interleukin-2 receptor subunit gamma) (IL- | | |
| 2 receptor subunit gamma) (IL-2R subunit | | |
| gamma) (IL-2RG) (gammaC) (p64) (CD | | |
| antigen CD132) | | |
| Tumor necrosis factor receptor superfamily | TNFRSF17 BCM | SEQ ID NO: 27 |
| member 17 (B-cell maturation protein) (CD | BCMA | |
| antigen CD269) | | |
| Tumor necrosis factor receptor superfamily | TNFRSF10A APO2 | SEQ ID NO: 28 |
| member 10A (Death receptor 4) (TNF- | DR4 TRAILR1 | |
| related apoptosis-inducing ligand receptor | | |
| 1) (TRAIL receptor 1) (TRAIL-R1) (CD | | |
| antigen CD261) | | |
| SLAM family member 7 (CD2 subset 1) | SLAMF7 CS1 | SEQ ID NO: 29 |
| (CD2-like receptor-activating cytotoxic | UNQ576/PRO1138 | |
| cells) (CRACC) (Membrane protein FOAP- | | |
| 12) (Novel Ly9) (Protein 19A) (CD antigen | | |
| CD319) | | |
| Tumor necrosis factor receptor superfamily | TNFRSF1B TNFBR | SEQ ID NO: 30 |
| member 1B (Tumor necrosis factor | TNFR2 | |
| receptor 2) (TNF-R2) (Tumor necrosis factor | | |
| receptor type II) (TNF-RII) (TNFR-II) (p75) | | |
| (p80 TNF-alpha receptor) (CD antigen | | |
| CD120b) (Etanercept) [Cleaved into: Tumor | | |
| necrosis factor receptor superfamily | | |
| member 1b, membrane form; Tumor | | |
| necrosis factor-binding protein 2 (TBP-2) | | |
| (TBPII)] | | |
| Leukocyte-associated immunoglobulin-like | LAIR1 CD305 | SEQ ID NO: 31 |
| receptor 1 (LAIR-1) (hLAIR1) (CD antigen | | |
| CD305) | | |
| Toll-like receptor 1 (EC 3.2.2.6) | TLR1 KIAA0012 | SEQ ID NO: 32 |
| (Toll/interleukin-1 receptor-like protein) | | |
| (TIL) (CD antigen CD281) | | |
| Toll-like receptor 7 | TLR7 | SEQ ID NO: 33 |
| | UNQ248/PRO285 | |
| Tumor necrosis factor receptor superfamily | TNFRSF18 AITR GITR | SEQ ID NO: 34 |
| member 18 (Activation-inducible TNFR | UNQ319/PRO364 | |
| family receptor) (Glucocorticoid-induced | | |
| TNFR-related protein) (CD antigen CD357) | | |
| Tumor necrosis factor receptor superfamily | TNFRSF8 CD30 | SEQ ID NO: 35 |
| member 8 (CD30L receptor) (Ki-1 antigen) | D1S166E | |
| (Lymphocyte activation antigen CD30) (CD | | |
| antigen CD30) | | |
| Interferon alpha/beta receptor 2 (IFN-R-2) | IFNAR2 IFNABR | SEQ ID NO: 36 |
| (IFN-alpha binding protein) (IFN-alpha/beta | IFNARB | |
| receptor 2) (Interferon alpha binding | | |
| protein) (Type I interferon receptor 2) | | |
| SLAM family member 6 (Activating NK | SLAMF6 KALI | SEQ ID NO: 37 |
| receptor) (NK-T-B-antigen) (NTB-A) (CD | UNQ6123/PRO20080 | |
| antigen CD352) | | |
| Tumor necrosis factor receptor superfamily | TNFRSF10D DCR2 | SEQ ID NO: 38 |
| member 10D (Decoy receptor 2) (DcR2) | TRAILR4 TRUNDD | |
| (TNF-related apoptosis-inducing ligand | UNQ251/PRO288 | |
| receptor 4) (TRAIL receptor 4) (TRAIL-R4) | | |
| (TRAIL receptor with a truncated death | | |
| domain) (CD antigen CD264) | | |
| P-selectin glycoprotein ligand 1 (PSGL-1) | SELPLG | SEQ ID NO: 39 |
| (Selectin P ligand) (CD antigen CD162) | | |
| T-cell surface protein tactile (Cell surface | CD96 | SEQ ID NO: 40 |
| antigen CD96) (T cell-activated increased | | |
| late expression protein) (CD antigen CD96) | | |
| Porimin (Keratinocytes-associated | TMEM123 KCT3 | SEQ ID NO: 41 |
| transmembrane protein 3) (KCT-3) (Pro- | PSEC0111 | |
| oncosis receptor inducing membrane | UNQ641/PRO1271 | |
| injury) (Transmembrane protein 123) | | |
| Integrin alpha-4 (CD49 antigen-like family | ITGA4 CD49D | SEQ ID NO: 42 |
| member D) (Integrin alpha-IV) (VLA-4 | | |
| subunit alpha) (CD antigen CD49d) | | |
| G-protein coupled receptor 15 (Brother of | GPR15 | SEQ ID NO: 43 |
| Bonzo) (BoB) | | |
| Multidrug resistance-associated protein 1 | ABCC1 MRP MRP1 | SEQ ID NO: 44 |
| (EC 7.6.2.2) (ATP-binding cassette sub- | | |
| family C member 1) (Glutathione-S- | | |
| conjugate-translocating ATPase ABCC1) (EC | | |
| 7.6.2.3) (Leukotriene C(4) transporter) | | |
| (LTC4 transporter) | | |
| CX3C chemokine receptor 1 (C-X3-C CKR-1) | CX3CR1 CMKBRL1 | SEQ ID NO: 45 |
| (CX3CR1) (Beta chemokine receptor-like 1) | GPR13 | |
| (CMK-BRL-1) (CMK-BRL1) (Fractalkine | | |
| receptor) (G-protein coupled receptor 13) | | |
| (V28) | | |
| B-lymphocyte antigen CD20 (B-lymphocyte | MS4A1 CD20 | SEQ ID NO: 46 |
| surface antigen B1) (Bp35) (Leukocyte | | |
| surface antigen Leu-16) (Membrane- | | |
| spanning 4-domains subfamily A member | | |
| 1) (CD antigen CD20) | | |
| HLA class II histocompatibility antigen, DM | HLA-DMB DMB | SEQ ID NO: 47 |
| beta chain (MHC class II antigen DMB) | RING7 | |
| (Really interesting new gene 7 protein) | | |
| Low affinity immunoglobulin gamma Fc | FCGR2B CD32 FCG2 | SEQ ID NO: 48 |
| region receptor II-b (IgG Fc receptor II-b) | IGFR2 | |
| (CDw32) (Fc-gamma RII-b) (Fc-gamma-RIIb) | | |
| (FcRII-b) (CD antigen CD32) | | |
| HLA class I histocompatibility antigen, | HLA-F HLA-5.4 HLAF | SEQ ID NO: 49 |
| alpha chain F (CDA12) (HLA F antigen) | | |
| (Leukocyte antigen F) (MHC class I antigen | | |
| F) | | |
| Disintegrin and metalloproteinase domain- | ADAM9 KIAA0021 | SEQ ID NO: 50 |
| containing protein 9 (ADAM 9) (EC 3.4.24.-) | MCMP MDC9 | |
| (Cellular disintegrin-related protein) | MLTNG | |
| (Meltrin-gamma) | | |
| (Metalloprotease/disintegrin/cysteine-rich | | |
| protein 9) (Myeloma cell | | |
| metalloproteinase) | | |
| IgG receptor FcRn large subunit p51 (FcRn) | FCGRT FCRN | SEQ ID NO: 51 |
| (IgG Fc fragment receptor transporter | | |
| alpha chain) (Neonatal Fc receptor) | | |
| Interleukin-6 receptor subunit beta (IL-6 | IL6ST | SEQ ID NO: 52 |
| receptor subunit beta) (IL-6R subunit beta) | | |
| (IL-6R-beta) (IL-6RB) (CDw130) (Interleukin- | | |
| 6 signal transducer) (Membrane | | |
| glycoprotein 130) (gp130) (Oncostatin-M | | |
| receptor subunit alpha) (CD antigen CD130) | | |
| Lymphocyte function-associated antigen 3 | CD58 LFA3 | SEQ ID NO: 53 |
| (Ag3) (Surface glycoprotein LFA-3) (CD | | |
| antigen CD58) | | |
| C-C chemokine receptor type 10 (C-C CKR- | CCR10 GPR2 | SEQ ID NO: 54 |
| 10) (CC-CKR-10) (CCR-10) (G-protein | | |
| coupled receptor 2) | | |
| C-type lectin domain family 7 member A | CLEC7A BGR | SEQ ID NO: 55 |
| (Beta-glucan receptor) (C-type lectin | CLECSF12 DECTIN1 | |
| superfamily member 12) (Dendritic cell- | UNQ539/PRO1082 | |
| associated C-type lectin 1) (DC-associated | | |
| C-type lectin 1) (Dectin-1) (CD antigen | | |
| CD369) | | |
| CD320 antigen (8D6 antigen) (FDC-signaling | CD320 8D6A | SEQ ID NO: 56 |
| molecule 8D6) (FDC-SM-8D6) | UNQ198/PRO224 | |
| (Transcobalamin receptor) (TCblR) (CD | | |
| antigen CD320) | | |
| Fc receptor-like protein 3 (FcR-like protein | FCRL3 FCRH3 IFGP3 | SEQ ID NO: 57 |
| 3) (FcRL3) (Fc receptor homolog 3) (FcRH3) | IRTA3 SPAP2 | |
| (IFGP family protein 3) (hIFGP3) (Immune | | |
| receptor translocation-associated protein | | |
| 3) (SH2 domain-containing phosphatase | | |
| anchor protein 2) (CD antigen CD307c) | | |
| Plexin-C1 (Virus-encoded semaphorin | PLXNC1 VESPR | SEQ ID NO: 58 |
| protein receptor) (CD antigen CD232) | | |
| Interleukin-17 receptor A (IL-17 receptor A) | IL17RA IL17R | SEQ ID NO: 59 |
| (IL-17RA) (CDw217) (CD antigen CD217) | | |
| C-C chemokine receptor type 1 (C-C CKR-1) | CCR1 CMKBR1 | SEQ ID NO: 60 |
| (CC-CKR-1) (CCR-1) (CCR1) (HM145) (LD78 | CMKR1 SCYAR1 | |
| receptor) (Macrophage inflammatory | | |
| protein 1-alpha receptor) (MIP-1alpha-R) | | |
| (RANTES-R) (CD antigen CD191) | | |
| T-lymphocyte activation antigen CD80 | CD80 CD28LG | SEQ ID NO: 61 |
| (Activation B7-1 antigen) (BB1) (CTLA-4 | CD28LG1 LAB7 | |
| counter-receptor B7.1) (B7) (CD antigen | | |
| CD80) | | |
| Proteinase-activated receptor 4 (PAR-4) | F2RL3 PAR4 | SEQ ID NO: 62 |
| (Coagulation factor II receptor-like 3) | | |
| (Thrombin receptor-like 3) | | |
| Interleukin-6 receptor subunit alpha (IL-6 | IL6R | SEQ ID NO: 63 |
| receptor subunit alpha) (IL-6R subunit | | |
| alpha) (IL-6R-alpha) (IL-6RA) (IL-6R 1) | | |
| (Membrane glycoprotein 80) (gp80) (CD | | |
| antigen CD126) | | |
| Hepatitis A virus cellular receptor 2 (HAVcr- | HAVCR2 TIM3 TIMD3 | SEQ ID NO: 64 |
| 2) (T-cell immunoglobulin and mucin | | |
| domain-containing protein 3) (TIMD-3) (T- | | |
| cell immunoglobulin mucin receptor 3) | | |
| (TIM-3) (T-cell membrane protein 3) (CD | | |
| antigen CD366) | | |
| Interleukin-27 receptor subunit alpha (IL-27 | IL27RA CRL1 TCCR | SEQ ID NO: 65 |
| receptor subunit alpha) (IL-27R subunit | WSX1 | |
| alpha) (IL-27R-alpha) (IL-27RA) (Cytokine | UNQ296/PRO336 | |
| receptor WSX-1) (Cytokine receptor-like 1) | | |
| (Type I T-cell cytokine receptor) (TCCR) | | |
| (ZcytoR1) | | |
| Interleukin-13 receptor subunit alpha-2 (IL- | IL13RA2 IL13R | SEQ ID NO: 66 |
| 13 receptor subunit alpha-2) (IL-13R | | |
| subunit alpha-2) (IL-13R-alpha-2) (IL- | | |
| 13RA2) (Interleukin-13-binding protein) (CD | | |
| antigen CD213a2) | | |
| Integrin beta-7 (Gut homing receptor beta | ITGB7 | SEQ ID NO: 67 |
| subunit) | | |
| Fc receptor-like protein 2 (FcR-like protein | FCRL2 FCRH2 IFGP4 | SEQ ID NO: 68 |
| 2) (FcRL2) (Fc receptor homolog 2) (FcRH2) | IRTA4 SPAP1 | |
| (IFGP family protein 4) (Immunoglobulin | UNQ9236/PRO31998 | |
| receptor translocation-associated protein | | |
| 4) (SH2 domain-containing phosphatase | | |
| anchor protein 1) (CD antigen CD307b) | | |
| L-selectin (CD62 antigen-like family | SELL LNHR LYAM1 | SEQ ID NO: 69 |
| member L) (Leukocyte adhesion molecule | | |
| 1) (LAM-1) (Leukocyte surface antigen Leu- | | |
| 8) (Leukocyte-endothelial cell adhesion | | |
| molecule 1) (LECAM1) (Lymph node | | |
| homing receptor) (TQ1) (gp90-MEL) (CD | | |
| antigen CD62L) | | |
| Intercellular adhesion molecule 2 (ICAM-2) | ICAM2 | SEQ ID NO: 70 |
| (CD antigen CD102) | | |
| CD82 antigen (C33 antigen) (IA4) (Inducible | CD82 KAI1 SAR2 ST6 | SEQ ID NO: 71 |
| membrane protein R2) (Metastasis | TSPAN27 | |
| suppressor Kangai-1) (Suppressor of | | |
| tumorigenicity 6 protein) (Tetraspanin-27) | | |
| (Tspan-27) (CD antigen CD82) | | |
| CD83 antigen (hCD83) (B-cell activation | CD83 | SEQ ID NO: 72 |
| protein) (Cell surface protein HB15) (CD | | |
| antigen CD83) | | |
| Activin receptor type-1B (EC 2.7.11.30) | ACVR1B ACVRLK4 | SEQ ID NO: 73 |
| (Activin receptor type IB) (ACTR-IB) (Activin | ALK4 | |
| receptor-like kinase 4) (ALK-4) | | |
| (Serine/threonine-protein kinase receptor | | |
| R2) (SKR2) | | |
| Lymphocyte antigen 75 (Ly-75) (C-type | LY75 CD205 CLEC13B | SEQ ID NO: 74 |
| lectin domain family 13 member B) (DEC- | | |
| 205) (gp200-MR6) (CD antigen CD205) | | |
| Junctional adhesion molecule B (JAM-B) | JAM2 C21orf43 | SEQ ID NO: 75 |
| (Junctional adhesion molecule 2) (JAM-2) | VEJAM | |
| (Vascular endothelial junction-associated | UNQ219/PRO245 | |
| molecule) (VE-JAM) (CD antigen CD322) | | |
| Low-density lipoprotein receptor-related | LRP8 APOER2 | SEQ ID NO: 76 |
| protein 8 (LRP-8) (Apolipoprotein E | | |
| receptor 2) | | |
| Cytokine receptor common subunit beta | CSF2RB IL3RB IL5RB | SEQ ID NO: 77 |
| (CDw131) (GM-CSF/IL-3/IL-5 receptor | | |
| common beta subunit) (CD antigen CD131) | | |
| Interleukin-10 receptor subunit beta (IL-10 | IL10RB CRFB4 | SEQ ID NO: 78 |
| receptor subunit beta) (IL-10R subunit | D21S58 D21S66 | |
| beta) (IL-10RB) (Cytokine receptor class-II | | |
| member 4) (Cytokine receptor family 2 | | |
| member 4) (CRF2-4) (Interleukin-10 | | |
| receptor subunit 2) (IL-10R subunit 2) (IL- | | |
| 10R2) (CD antigen CDw210b) | | |
| Interferon gamma receptor 1 (IFN-gamma | IFNGR1 | SEQ ID NO: 79 |
| receptor 1) (IFN-gamma-R1) (CDw119) | | |
| (Interferon gamma receptor alpha-chain) | | |
| (IFN-gamma-R-alpha) (CD antigen CD119) | | |
| Adhesion G-protein coupled receptor G6 | ADGRG6 DREG | SEQ ID NO: 80 |
| (Developmentally regulated G-protein- | GPR126 VIGR | |
| coupled receptor) (G-protein coupled | | |
| receptor 126) (Vascular inducible G | | |
| protein-coupled receptor) [Cleaved into: | | |
| ADGRG6 N-terminal fragment (ADGRG6- | | |
| NTF); ADGRG6 C-terminal fragment | | |
| (ADGRG6-CTF)] | | |
| Adenosine receptor A2a | ADORA2A ADORA2 | SEQ ID NO: 81 |
| Progressive ankylosis protein homolog | ANKH KIAA1581 | SEQ ID NO: 82 |
| (ANK) | UNQ241/PRO274 | |
| Cell adhesion molecule-related/down- | CDON CDO | SEQ ID NO: 83 |
| regulated by oncogenes | | |
| CSC1-like protein 1 (Transmembrane | TMEM63A KIAA0489 | SEQ ID NO: 84 |
| protein 63A) | KIAA0792 | |
| Toll-like receptor 9 (CD antigen CD289) | TLR9 | SEQ ID NO: 85 |
| | UNQ5798/PRO19605 | |
| Sodium- and chloride-dependent taurine | SLC6A6 | SEQ ID NO: 86 |
| transporter (Solute carrier family 6 | | |
| member 6) | | |
| CD48 antigen (B-lymphocyte activation | CD48 BCM1 BLAST1 | SEQ ID NO: 87 |
| marker BLAST-1) (BCM1 surface antigen) | | |
| (Leukocyte antigen MEM-102) (SLAM | | |
| family member 2) (SLAMF2) (Signaling | | |
| lymphocytic activation molecule 2) (TCT.1) | | |
| (CD antigen CD48) | | |
| ADP-ribosyl cyclase/cyclic ADP-ribose | CD38 | SEQ ID NO: 88 |
| hydrolase 1 (EC 3.2.2.6) (2′-phospho-ADP- | | |
| ribosyl cyclase) (2′-phospho-ADP-ribosyl | | |
| cyclase/2′-phospho-cyclic-ADP-ribose | | |
| transferase) (EC 2.4.99.20) (2′-phospho- | | |
| cyclic-ADP-ribose transferase) (ADP-ribosyl | | |
| cyclase 1) (ADPRC 1) (Cyclic ADP-ribose | | |
| hydrolase 1) (cADPr hydrolase 1) (T10) (CD | | |
| antigen CD38) | | |
| Muscarinic acetylcholine receptor M3 | CHRM3 | SEQ ID NO: 89 |
| Macrophage colony-stimulating factor 1 | CSF1 | SEQ ID NO: 90 |
| (CSF-1) (M-CSF) (MCSF) (Lanimostim) | | |
| [Cleaved into: Processed macrophage | | |
| colony-stimulating factor 1] | | |
| Multidrug resistance-associated protein 4 | ABCC4 MRP4 | SEQ ID NO: 91 |
| (ATP-binding cassette sub-family C member | | |
| 4) (MRP/cMOAT-related ABC transporter) | | |
| (Multi-specific organic anion transporter B) | | |
| (MOAT-B) | | |
| Potassium voltage-gated channel subfamily | KCNA3 HGK5 | SEQ ID NO: 92 |
| A member 3 (HGK5) (HLK3) (HPCN3) | | |
| (Voltage-gated K(+) channel HuKIII) | | |
| (Voltage-gated potassium channel subunit | | |
| Kv1.3) | | |
| Sialic acid-binding Ig-like lectin 7 (Siglec-7) | SIGLEC7 AIRM1 | SEQ ID NO: 93 |
| (Adhesion inhibitory receptor molecule 1) | | |
| (AIRM-1) (CDw328) (D-siglec) (QA79 | | |
| membrane protein) (p75) (CD antigen | | |
| CD328) | | |
| Sphingosine 1-phosphate receptor 4 (S1P | S1PR4 EDG6 | SEQ ID NO: 94 |
| receptor 4) (S1P4) (Endothelial | | |
| differentiation G-protein coupled receptor | | |
| 6) (Sphingosine 1-phosphate receptor Edg- | | |
| 6) (S1P receptor Edg-6) | | |
| Transmembrane protein 106B | TMEM106B | SEQ ID NO: 95 |
| Proton-coupled folate transporter (G21) | SLC46A1 HCP1 PCFT | SEQ ID NO: 96 |
| (Heme carrier protein 1) (PCFT/HCP1) | | |
| (Solute carrier family 46 member 1) | | |
| Allergin-1 (Allergy inhibitory receptor 1) | MILR1 C17orf60 | SEQ ID NO: 97 |
| (Mast cell antigen 32) (MCA-32) (Mast cell | MCA32 | |
| immunoglobulin-like receptor 1) | | |
| Steryl-sulfatase (EC 3.1.6.2) (Arylsulfatase | STS ARSC1 | SEQ ID NO: 98 |
| C) (ASC) (Estrone sulfatase) (Steroid | | |
| sulfatase) (Steryl-sulfate sulfohydrolase) | | |
| Tumor necrosis factor receptor superfamily | FAS APT1 FAS1 | SEQ ID NO: 99 |
| member 6 (Apo-1 antigen) (Apoptosis- | TNFRSF6 | |
| mediating surface antigen FAS) (FASLG | | |
| receptor) (CD antigen CD95) | | |
| Presenilin-2 (PS-2) (EC 3.4.23.-) (AD3LP) | PSEN2 AD4 PS2 | SEQ ID NO: 100 |
| (AD5) (E5-1) (STM-2) [Cleaved into: | PSNL2 STM2 | |
| Presenilin-2 NTF subunit; Presenilin-2 CTF | | |
| subunit] | | |
| Solute carrier organic anion transporter | SLCO4A1 OATP1 | SEQ ID NO: 101 |
| family member 4A1 (OATP4A1) (Colon | OATP4A1 OATPE | |
| organic anion transporter) (Organic anion | SLC21A12 | |
| transporter polypeptide-related protein 1) | | |
| (OATP-RP1) (OATPRP1) (POAT) (Organic | | |
| anion-transporting polypeptide E) (OATP-E) | | |
| (Sodium-independent organic anion | | |
| transporter E) (Solute carrier family 21 | | |
| member 12) | | |
| Solute carrier organic anion transporter | SLCO3A1 OATP3A1 | SEQ ID NO: 102 |
| family member 3A1 (OATP3A1) (Organic | OATPD SLC21A11 | |
| anion transporter polypeptide-related | | |
| protein 3) (OATP-RP3) (OATPRP3) (Organic | | |
| anion-transporting polypeptide D) (OATP- | | |
| D) (PGE1 transporter) (Sodium- | | |
| independent organic anion transporter D) | | |
| (Solute carrier family 21 member 11) | | |
| Transmembrane protein 154 | TMEM154 | SEQ ID NO: 103 |
| Semaphorin-4A (Semaphorin-B) (Sema B) | SEMA4A SEMAB | SEQ ID NO: 104 |
| | SEMB | |
| | UNQ783/PRO1317 | |
| Multidrug resistance-associated protein 5 | ABCC5 MRP5 | SEQ ID NO: 105 |
| (ATP-binding cassette sub-family C member | | |
| 5) (Multi-specific organic anion transporter | | |
| C) (MOAT-C) (SMRP) (pABC11) | | |
| Transmembrane protein 132E | TMEM132E | SEQ ID NO: 106 |
| Netrin receptor UNC5C (Protein unc-5 | UNC5C UNC5H3 | SEQ ID NO: 107 |
| homolog 3) (Protein unc-5 homolog C) | | |
| Scavenger receptor class B member 1 | SCARB1 CD36L1 | SEQ ID NO: 108 |
| (SRB1) (CD36 and LIMPII analogous 1) (CLA- | CLA1 | |
| 1) (CD36 antigen-like 1) (Collagen type I | | |
| receptor, thrombospondin receptor-like 1) | | |
| (SR-BI) (CD antigen CD36) | | |
| Zinc transporter ZIP6 (Estrogen-regulated | SLC39A6 LIV1 ZIP6 | SEQ ID NO: 109 |
| protein LIV-1) (Solute carrier family 39 | | |
| member 6) (Zrt- and Irt-like protein 6) (ZIP- | | |
| 6) | | |
| Inactive tyrosine-protein kinase | ROR1 NTRKR1 | SEQ ID NO: 110 |
| transmembrane receptor ROR1 | | |
| (Neurotrophic tyrosine kinase, receptor- | | |
| related 1) | | |
| Solute carrier family 26 member 6 (Anion | SLC26A6 | SEQ ID NO: 111 |
| exchange transporter) (Pendrin-like protein | | |
| 1) (Pendrin-L1) | | |
| SLIT and NTRK-like protein 5 (Leucine-rich | SLITRK5 KIAA0918 | SEQ ID NO: 112 |
| repeat-containing protein 11) | LRRC11 | |
| Cell surface glycoprotein CD200 receptor 1 | CD200R1 CD200R | SEQ ID NO: 113 |
| (CD200 cell surface glycoprotein receptor) | CRTR2 MOX2R OX2R | |
| (Cell surface glycoprotein OX2 receptor 1) | UNQ2522/PRO6015 | |
| Discoidin, CUB and LCCL domain-containing | DCBLD1 | SEQ ID NO: 114 |
| protein 1 | | |
| CD109 antigen (150 kDa TGF-beta-1- | CD109 CPAMD7 | SEQ ID NO: 115 |
| binding protein) (C3 and PZP-like alpha-2- | | |
| macroglobulin domain-containing protein | | |
| 7) (Platelet-specific Gov antigen) (p180) | | |
| (r150) (CD antigen CD109) | | |
| C3a anaphylatoxin chemotactic receptor | C3AR1 AZ3B C3R1 | SEQ ID NO: 116 |
| (C3AR) (C3a-R) | HNFAG09 | |
| CD70 antigen (CD27 ligand) (CD27-L) | CD70 CD27L CD27LG | SEQ ID NO: 117 |
| (Tumor necrosis factor ligand superfamily | TNFSF7 | |
| member 7) (CD antigen CD70) | | |
| Large neutral amino acids transporter small | SLC43A2 LAT4 | SEQ ID NO: 118 |
| subunit 4 (L-type amino acid transporter 4) | PP7664 | |
| (Solute carrier family 43 member 2) | | |
| HLA class II histocompatibility antigen, DR | HLA-DRB5 | SEQ ID NO: 119 |
| beta 5 chain (DR beta-5) (DR2-beta-2) | | |
| (Dw2) (MHC class II antigen DRB5) | | |
| Ephrin type-A receptor 5 (EC 2.7.10.1) | EPHA5 BSK EHK1 | SEQ ID NO: 120 |
| (Brain-specific kinase) (EPH homology | HEK7 TYRO4 | |
| kinase 1) (EHK-1) (EPH-like kinase 7) (EK7) | | |
| (hEK7) | | |
| Monocarboxylate transporter 2 (MCT 2) | SLC16A7 MCT2 | SEQ ID NO: 121 |
| (Solute carrier family 16 member 7) | | |
| Cysteine-rich motor neuron 1 protein | CRIM1 S52 | SEQ ID NO: 122 |
| (CRIM-1) (Cysteine-rich repeat-containing | UNQ1886/PRO4330 | |
| protein S52) [Cleaved into: Processed | | |
| cysteine-rich motor neuron 1 protein] | | |
| Nuclear envelope integral membrane | NEMP1 KIAA0286 | SEQ ID NO: 123 |
| protein 1 | TMEM194 | |
| | TMEM194A | |
| HLA class II histocompatibility antigen, DR | HLA-DRB4 | SEQ ID NO: 124 |
| beta 4 chain (MHC class II antigen DRB4) | | |
| Cationic amino acid transporter 2 (CAT-2) | SLC7A2 ATRC2 CAT2 | SEQ ID NO: 125 |
| (CAT2) (Low affinity cationic amino acid | | |
| transporter 2) (Solute carrier family 7 | | |
| member 2) | | |
| Integral membrane protein 2C (Cerebral | ITM2C BRI3 hucep- | SEQ ID NO: 126 |
| protein 14) (Transmembrane protein BRI3) | 14 NPD018 | |
| [Cleaved into: CT-BRI3] | PSEC0047 | |
| Ephrin type-A receptor 3 (EC 2.7.10.1) | EPHA3 ETK ETK1 HEK | SEQ ID NO: 127 |
| (EPH-like kinase 4) (EK4) (hEK4) (HEK) | TYRO4 | |
| (Human embryo kinase) (Tyrosine-protein | | |
| kinase TYRO4) (Tyrosine-protein kinase | | |
| receptor ETK1) (Eph-like tyrosine kinase 1) | | |
| Lysosome-associated membrane | LAMP5 C20orf103 | SEQ ID NO: 128 |
| glycoprotein 5 (Brain and dendritic cell- | | |
| associated LAMP) (Brain-associated LAMP- | | |
| like protein) (BAD-LAMP) (Lysosome- | | |
| associated membrane protein 5) (LAMP-5) | | |
| Metal transporter CNNM2 (Ancient | CNNM2 ACDP2 | SEQ ID NO: 129 |
| conserved domain-containing protein 2) | | |
| (Cyclin-M2) | | |
| CD177 antigen (Human neutrophil | CD177 NB1 PRV1 | SEQ ID NO: 130 |
| alloantigen 2a) (HNA-2a) (NB1 | UNQ595/PRO1181 | |
| glycoprotein) (NB1 GP) (Polycythemia rubra | | |
| vera protein 1) (PRV-1) (CD antigen CD177) | | |
| Zinc transporter ZIP10 (Solute carrier family | SLC39A10 KIAA1265 | SEQ ID NO: 131 |
| 39 member 10) (Zrt- and Irt-like protein 10) | ZIP10 | |
| (ZIP-10) | | |
| Plexin-A3 (Plexin-4) (Semaphorin receptor | PLXNA3 PLXN4 SEX | SEQ ID NO: 132 |
| SEX) | | |
| Phospholipid phosphatase 2 (EC 3.1.3.-) (EC | PLPP2 LPP2 PPAP2C | SEQ ID NO: 133 |
| 3.1.3.4) (Lipid phosphate | | |
| phosphohydrolase 2) (PAP2-gamma) | | |
| (PAP2-G) (Phosphatidate | | |
| phosphohydrolase type 2c) (Phosphatidic | | |
| acid phosphatase 2c) (PAP-2c) (PAP2c) | | |
| Serine incorporator 3 (Tumor differentially | SERINC3 DIFF33 | SEQ ID NO: 134 |
| expressed protein 1) | TDE1 SBBI99 | |
| Sodium/myo-inositol cotransporter | SLC5A3 | SEQ ID NO: 135 |
| (Na(+)/myo-inositol cotransporter) | | |
| (Sodium/myo-inositol transporter 1) | | |
| (SMIT1) (Solute carrier family 5 member 3) | | |
| Teneurin-3 (Ten-3) (Protein Odd Oz/ten-m | TENM3 KIAA1455 | SEQ ID NO: 136 |
| homolog 3) (Tenascin-M3) (Ten-m3) | ODZ3 TNM3 | |
| (Teneurin transmembrane protein 3) | | |
| Sodium-coupled neutral amino acid | SLC38A5 JM24 SN2 | SEQ ID NO: 137 |
| transporter 5 (Solute carrier family 38 | SNAT5 PP7194 | |
| member 5) (System N transporter 2) | | |
| Solute carrier family 23 member 2 (Na(+)/L- | SLC23A2 KIAA0238 | SEQ ID NO: 138 |
| ascorbic acid transporter 2) (Nucleobase | NBTL1 SLC23A1 | |
| transporter-like 1 protein) (Sodium- | SVCT2 YSPL2 | |
| dependent vitamin C transporter 2) (hSVCT2) | | |
| (Yolk sac permease-like molecule 2) | | |
| Sialin (H(+)/nitrate cotransporter) | SLC17A5 | SEQ ID NO: 139 |
| (H(+)/sialic acid cotransporter) (AST) | | |
| (Membrane glycoprotein HP59) (Solute | | |
| carrier family 17 member 5) (Vesicular | | |
| H(+)/Aspartate-glutamate cotransporter) | | |
| Urokinase plasminogen activator surface | PLAUR MO3 UPAR | SEQ ID NO: 140 |
| receptor (U-PAR) (uPAR) (Monocyte | | |
| activation antigen Mo3) (CD antigen CD87) | | |
| Sn1-specific diacylglycerol lipase beta (DGL- | DAGLB | SEQ ID NO: 141 |
| beta) (EC 3.1.1.-) (KCCR13L) | | |
| Embigin | EMB | SEQ ID NO: 142 |
| Protein HEG homolog 1 | HEG1 KIAA1237 | SEQ ID NO: 143 |
| Plexin-A4 | PLXNA4 KIAA1550 | SEQ ID NO: 144 |
| | PLXNA4A PLXNA4B | |
| | UNQ2820/PRO34003 | |
| Protein ELFN1 (Extracellular leucine-rich | ELFN1 PPP1R28 | SEQ ID NO: 145 |
| repeat and fibronectin type-III domain- | | |
| containing protein 1) (Protein phosphatase | | |
| 1 regulatory subunit 28) | | |
| Adhesion G-protein coupled receptor G5 | ADGRG5 GPR114 | SEQ ID NO: 146 |
| (G-protein coupled receptor 114) (G- | PGR27 | |
| protein coupled receptor PGR27) | UNQ2524/PRO6017 | |
| Leucine-rich repeat and fibronectin type III | LRFN1 KIAA1484 | SEQ ID NO: 147 |
| domain-containing protein 1 (Synaptic | SALM2 | |
| adhesion-like molecule 2) | | |
| CD160 antigen (Natural killer cell receptor | CD160 BY55 | SEQ ID NO: 148 |
| BY55) (CD antigen CD160) [Cleaved into: | | |
| CD160 antigen, soluble form] | | |
| Battenin (Batten disease protein) (Protein | CLN3 BTS | SEQ ID NO: 149 |
| CLN3) | | |
| Transmembrane protein 178B | TMEM178B | SEQ ID NO: 150 |
| RGM domain family member B (DRG11- | RGMB | SEQ ID NO: 151 |
| responsive axonal guidance and outgrowth | | |
| of neurite) (DRAGON) | | |
| Reversion-inducing cysteine-rich protein | RECK ST15 | SEQ ID NO: 152 |
| with Kazal motifs (hRECK) (Suppressor of | | |
| tumorigenicity 15 protein) | | |
| Natural cytotoxicity triggering receptor 3 | NCR3LG1 B7H6 | SEQ ID NO: 153 |
| ligand 1 (B7 homolog 6) (B7-H6) | | |
| Testisin (EC 3.4.21.-) (Eosinophil serine | PRSS21 ESP1 TEST1 | SEQ ID NO: 154 |
| protease 1) (ESP-1) (Serine protease 21) | UNQ266/PRO303 | |
| UL16-binding protein 3 (ALCAN-gamma) | ULBP3 N2DL3 | SEQ ID NO: 155 |
| (NKG2D ligand 3) (N2DL-3) (NKG2DL3) | RAET1N | |
| (Retinoic acid early transcript 1N) | | |

### Example 2

### Additional MM Surface Protein Analysis

[0119] The unbiased pool of 5,454 Uniprot IDs corresponding to 4,761 proteins identified in the surface-specific proteomic analyses of seven multiple myeloma cell lines as described in Example 1 was subjected to further analysis.

[0120] Given the lack of bioinformatics tools enabling accurate detection of proteins at the cell surface location, we developed an integrated scoring database for surface protein annotation. To this purpose we merged five published databases using different methodologies in identifying molecules that localized to the plasma membrane: #1 (Dìaz-Ramos et al, Immunol Lett 2011, 134, 183-187, doi:10.1016/j.imlet.2010.09.016) was manually curated from the literature; #2 (Baush-Fluck et al. Proc Natl Acad Sci USA 2018, 115, E10988-E10997, doi:10.1073/pnas.1808790115.) was computationally compiled using a random forest classifier trained on domain-specific protein features and tested on a set of α-helical transmembrane proteins; #3 (Town et al. Proc Natl Acad Sci USA 2016, 113, 3603-3608, doi:10.1073/pnas.1521251113) was computationally compiled using GO and Uniprot annotation followed by transmembrane domain prediction and signal peptide prediction; #4 (da Cunha et al. Proc Natl Acad Sci USA 2009, 106, 16752-16757, doi:10.1073/pnas.0907939106) was computationally compiled by transmembrane domain prediction; #5 (Thule et al.) was experimentally determined by antibody-based immunofluorescence microscopy. In our integrative computational database, each uniprot ID is scored based on the number of databases it was identified in, with 0 denoting the protein was not found in any and 5 denoting the protein was found in all five (FIG. 1B). Based on this integrative computational tool cutoff 1 includes 1229 uniprot IDs, cutoff 2: 699 uniprot IDs, cutoff 3: 448 uniprot IDs, cutoff 4: 260 uniprot IDs and cutoff 5: 63 uniprot IDs. For further analyses we selected proteins with a surface score equal or higher than three representing a high-level of confidence for cell surface location.

[0121] We integrated the CoMMpass RNA-seq dataset providing gene expression data from 904 MM patients. This integrative approach served to identify surface targets that are relevant to the patient population. We applied our surface scoring system to 16,462 transcripts from MM patients and, identified 402 targets with a surface score higher than three and detected by MS (FIG. 1C). We have further selected 326 top surface proteins overlapping with high expressors in patients by calculating 1SD from the mean gene expression in patients. We calculated the average expression of each gene and removed low expressing genes (1 SD below the mean) and selected the genes that have expression over the cutoff (326 transcripts kept) (FIG. 1D). Of note, patient gene expression was unimodal except for 7 transcripts presenting a non-unimodal expression (NCAM1, TPBG, ROB1, LAMP5, APP, PTRCAP, PLXAN2).

[0122] This group of 326 surface proteins includes known MM-associated surface proteins, some of which are targeted in clinical and pre-clinical studies such as BCMA, SLAMF7, TACI, LY9, CD38. GPCR5D and FCRL5, also currently investigated in clinical trials for patients with MM did not result in this list because they were identified by transcriptomic analysis in patients, but we did not detect their protein expression by MS analysis.

### The MM Surfaceome Mainly Consists in Immune-Related Proteins

[0123] In order to gain insights into the function of these candidate surface proteins we performed functional enrichment analyses and, found that they can be divided into three main functional clusters: 1) proteins involved in immune-mediated pathways 2) transporters 3) proteins mediating the adhesion to the stroma. The surface proteins related to immune-mediated pathways (top cluster) involve 227 out of 326 molecules and thus, might mediate the interplay between immune cells and myeloma cells.

[0124] By further digging into this group of surface proteins with the Kegg and Reactome collections we found that cytokine-dependent mechanisms and NK-mediated cytotoxicity represent enriched mechanisms. These findings are consistent with previous studies in the immunobiology of MM, however a detailed profile of the surface proteins mediating these mechanisms had remained unknown or only partially known so-far.

### Normal Tissue Annotation Identifies Targetable Antigens

[0125] In order to identify therapeutically relevant targets, we used a pipeline we previously established for leukemia. This combines three public proteomic databases for human proteome annotation (Human Protein Atlas, Human Protein Map and Proteomics DataBase) and allowed the annotation of each candidate protein in a panel of 42 normal tissues and organs. Given that, we excluded proteins with high expression in any normal tissue except hematopoietic tissues and with an available annotation in less than two out of the three databases. Through this, we identified 94 out of 326 targets with minimal expression in normal tissues. This list includes BCMA, SLAMF7, ITGB7, TACI and Ly9. We also ranked each one of the 94 targets based on their expression in normal tissues and thus, predicted on-target off-tumor toxicity.

[0126] By overlapping the list of immune-related proteins (227) with that of proteins with a favorable profile in normal tissues we obtained 67 targets with both functional and therapeutic relevance (FIG. 3). Such latter list still includes BCMA, CD229, SLAMF7, ITGB7, TACI that are targeted in current pre-clinical trials for immunotherapy of MM.

### Validation in Primary Patient Samples Identifies 11 Targets

[0127] Based on the expression in normal tissues we chose 24 targets for further validation in primary MM patient samples. Eleven of these targets include CCR1 (SEQ ID NO: 60), CD320 (SEQ ID NO: 56), FCRL3(SEQ ID NO: 57), IFNGR1 (SEQ ID NO: 79), IL12RB1 (SEQ ID NO: 19), ITGA4 (SEQ ID NO: 42), LILRB4 (SEQ ID NO: 20), LRRC8D (SEQ ID NO: 112), SEMA4A (SEQ ID NO: 104), and SLAMF6 (SEQ ID NO: 37) and BCMA, and in some aspects, these targets can be integrated into modified or synthesized chimeric antigen receptors, antibodies or antibody binding fragments thereof, and immune cells including T-Cells containing or expressing the foregoing.

1. A method for identifying target multiple myeloma associated surface antigens, said method comprising:
identifying a plurality of genes that express cell-surface proteins in a first multiple myeloma sample and a second multiple myeloma sample;
selecting nucleic acids from said first multiple myeloma sample that have expression levels higher than a control gene unrelated to hematopoietic cells, and identifying the proteins corresponding to the detected elevated expressed nucleic acids to designate a first pool of selected proteins;
conducting mass spec analysis on proteins isolated from said second myeloma sample to identify proteins that are present in higher concentration in said second multiple myeloma relative to normal tissues, wherein such proteins represent a second pool of selected proteins;
excluding proteins with high expression in brain, spinal cord, gut, liver and kidney from said first and second pools to produce a modified first and second pool of proteins; and
identifying proteins common to said first and second modified pool of proteins as target multiple myeloma associated surface antigens.

2. The method of claim 1 wherein said first multiple myeloma sample and said second multiple myeloma sample are taken from the same tissue source.

3. The method of claim 1 wherein said first multiple myeloma sample is a nucleic acid pool of expressed genes from MM patients and said second multiple myeloma sample represents proteins expressed in MM cell lines.

4. The method of claim 1, wherein the target multiple myeloma associated surface antigen has an expression level in a normal tissue sample that is more than about one standard deviation below the normal peak of the protein expression level distribution of the normal tissue sample.

5. The method of claim 1, wherein mRNA is measured to determine the expression level of the nucleic acids used to identify proteins for the first pool of selected proteins.

6. A monoclonal antibody that specifically binds to
i) a polypeptide having at least 90% sequence identity to a polypeptide selected from the group consisting of SEQ ID NO: 1-155 or 168-208; or
ii) a polypeptide selected from the group consisting of SEQ ID NO: 19, SEQ ID NO: 20, SEQ ID NO: 37, SEQ ID NO: 42, SEQ ID NO: 54, SEQ ID NO: 56, SEQ ID NO: 57, SEQ ID NO: 79, SEQ ID NO: 112 and SEQ ID NO: 104; or
iii) a polypeptide having at least 90% sequence identity to a sequence selected from the group consisting of CCR1 (SEQ ID NO: 60), CD320 (SEQ ID NO: 56), FCRL3(SEQ ID NO: 57), IFNGR1 (SEQ ID NO: 79), IL12RB1 (SEQ ID NO: 19), ITGA4 (SEQ ID NO: 42), LILRB4 (SEQ ID NO: 20), LRRC8D (SEQ ID NO: 112), SEMA4A (SEQ ID NO: 104), and SLAMF6 (SEQ ID NO: 37); or
iv) to a polypeptide having at least 90% sequence identity to a sequence selected from the group consisting of SEQ ID NO: 1-155 or 168-208.

7-11. (canceled)

12. The monoclonal antibody of claim 6 further comprising a detectable label covalently linked to the antibody or a cytotoxic agent linked to the antibody.

13. (canceled)

14. A chimeric antigen receptor (CAR) comprising
an antibody, or antigen binding fragment thereof, that binds one or more epitopes of a polypeptide selected from the group consisting of SEQ ID NO: 1-155 or 168-208,
a transmembrane domain; and
an immune cell antigen receptor chain, wherein the transmembrane domain links the an antibody, or antigen binding fragment thereof to the immune cell antigen receptor chain.

15. The chimeric antigen receptor of claim 14 wherein the antibody or antigen binding fragment thereof, specifically binds to
i) a polypeptide selected from the group consisting of SEQ ID NO: 168-208; or
ii) a polypeptide having at least 95% sequence identity to a sequence selected from the group consisting of CCR1 (SEQ ID NO: 60), CD320 (SEQ ID NO: 56), FCRL3(SEQ ID NO: 57), IFNGR1 (SEQ ID NO: 79), IL12RB1 (SEQ ID NO: 19), ITGA4 (SEQ ID NO: 42), LILRB4 (SEQ ID NO: 20), LRRC8D (SEQ ID NO: 112), SEMA4A (SEQ ID NO: 104) and SLAMF6 (SEQ ID NO: 37);
iii) one or more epitopes of a polypeptide having at least 90% homology to a sequence selected from the group consisting of SEQ ID NO: 1-155 or 168-208
iv) binds to a polypeptide selected from the group consisting of SEQ ID NO: 19, SEQ ID NO: 20, SEQ ID NO: 37, SEQ ID NO: 42, SEQ ID NO: 54, SEQ ID NO: 56, SEQ ID NO: 57, SEQ ID NO: 79, SEQ ID NO: 112 and SEQ ID NO: 104.

16-19. (canceled)

20. The chimeric antigen receptor of claim 15 wherein said antibody or antigen binding fragment comprises an antibody single-chain variable fragment, optionally further comprising a hinge region located between the antibody single-chain variable fragment and the transmembrane domain.

21. (canceled)

22. A T-cell modified to express the chimeric antigen receptor of claim 20, optionally wherein the T-cell is a tumor infiltrating leukocyte.

23. (canceled)

24. A cell modified to express the chimeric antigen receptor of claim 20, wherein the cell is selected from the group consisting of an NK, macrophage and myeloid cell.

25. (canceled)

26. (canceled)

27. The T-cell of claim 22 wherein the T-cell antigen receptor chain is the CD3ζ chain (zeta-chain).

28. A pharmaceutical composition comprising the antibody of claim 6.

29. A method for treating multiple myeloma, said method comprising administering the pharmaceutical composition of claim 28 to a patient in need of such treatment.

30. An isolated immunoresponsive cell comprising an antigen recognizing receptor that binds to an antigen selected from the group consisting of CCR1 (SEQ ID NO: 60), CD320 (SEQ ID NO: 56), FCRL3(SEQ ID NO: 57), IFNGR1 (SEQ ID NO: 79), IL12RB1 (SEQ ID NO: 19), ITGA4 (SEQ ID NO: 42), LILRB4 (SEQ ID NO: 20), LRRC8D (SEQ ID NO: 112), SEMA4A (SEQ ID NO: 104), and SLAMF6 (SEQ ID NO: 37).

31. The isolated immunoresponsive cell of claim 30, wherein the antigen is selected from the group consisting of IL12RB1 (SEQ ID NO: 19), LILRB4 (SEQ ID NO: 20), SLAMF6 (SEQ ID NO: 37), CCR1 (SEQ ID NO: 60), and CD320 (SEQ ID NO: 56).

32. The isolated immunoresponsive cell of claim 31, wherein said antigen recognizing receptor is a T cell receptor (TCR), or a chimeric antigen receptor (CAR).

33. (canceled)

34. The isolated immunoresponsive cell of claim 33, wherein the intracellular signaling domain of said CAR is the CD3C-chain, CD97, CD1 la-CD 18, CD2, ICOS, CD27, CD 154, CD8, OX40, 4-IBB, CD28 signaling domain, or combinations thereof.

35. The isolated immunoresponsive cell of claim 34 wherein the cell is selected from the group consisting of a T cell, a Natural Killer (NK) cell, a cytotoxic T lymphocyte (CTL), a regulatory T cell, a Natural Killer T (NKT) cell, a human embryonic stem cell, and a pluripotent stem cell from which lymphoid cells may be differentiated.

36. An isolated immunoresponsive cell of claim 30 wherein said immunoresponsive cell comprises:
(a) a first antigen recognizing receptor that binds to a first antigen, and
(b) a second antigen recognizing receptor that binds to a second antigen, wherein each of the first antigen and the second antigen is selected from the group consisting of CCR1 (SEQ ID NO: 60), CD320 (SEQ ID NO: 56), FCRL3(SEQ ID NO: 57), IFNGR1 (SEQ ID NO: 79), IL12RB1 (SEQ ID NO: 19), ITGA4 (SEQ ID NO: 42), LILRB4 (SEQ ID NO: 20), LRRC8D (SEQ ID NO: 112), SEMA4A (SEQ ID NO: 104), and SLAMF6 (SEQ ID NO: 37), and the first antigen and the second antigen are different.

37. The isolated immunoresponsive cell of claim 36, wherein each of said antigen recognizing receptor is a T cell receptor (TCR) or a chimeric antigen receptor (CAR).

38. (canceled)

39. A method of reducing tumor burden in a subject, comprising administering to the subject an effective amount of the immunoresponsive cell of claim 36.

40. A pharmaceutical composition comprising the T-cell of claim 22.

The application's sequence listing, which the Patent Office published only in electronic form, follows.

SEQUENCE LISTING (208 sequences)

SEQ ID NO: 1 - protein, 489 aa, Homo sapiens
MVAERSPARSPGSWLFPGLWLLVLSGPGGLLRAQEQPSCRRAFDLYFVLDKSGSVANNWIEIYNFVQQLAERFVSPEMRLSFIVFSSQATIILPLTGDRGKISKGLEDLKRVSPVGETYIHEGLKLANEQIQKAGGLKTSSIIIALTDGKLDGLVPSYAEKEAKISRSLGASVYCVGVLDFEQAQLERIADSKEQVFPVKGGFQALKGIINSILAQSCTEILELQPSSVCVGEEFQIVLSGRGFMLGSRNGSVLCTYTVNETYTTSVKPVSVQLNSMLCPAPILNKAGETLDVSVSFNGGKSVISGSLIVTATECSNGIAAIIVILVLLLLLGIGLMWWFWPLCCKVVIKDPPPPPAPAPKEEEEEPLPTKKWPTVDASYYGGRGVGGIKRMEVRWGDKGSTEEGARLEKAKNAVVKIPEETEEPIRPRPPRPKPTHQPPQTKWYTPIKGRLDALWALLRRQYDRVSLMRPQEGDEVCIWECIEKELTA

SEQ ID NO: 2 - protein, 280 aa, Homo sapiens
MQAKYSSTRDMLDDDGDTTMSLHSQGSATTRHPEPRRTEHRAPSSTWRPVALTLLTLCLVLLIGLAALGLLFFQYYQLSNTGQDTISQMEERLGNTSQELQSLQVQNIKLAGSLQHVAEKLCRELYNKAGAHRCSPCTEQWKWHGDNCYQFYKDSKSWEDCKYFCLSENSTMLKINKQEDLEFAASQSYSEFFYSYWTGLLRPDSGKAWLWMDGTPFTSELFHIIIDVTSPRSRDCVAILNGMIFSKDCKELKRCVCERRAGMVKPESLHVPPETLGEGD

SEQ ID NO: 3 - protein, 220 aa, Homo sapiens
MLRLLLALNLFPSIQVTGNKILVKQSPMLVAYDNAVNLSCKYSYNLFSREFRASLHKGLDSAVEVCVVYGNYSQQLQVYSKTGFNCDGKLGNESVTFYLQNLYVNQTDIYFCKIEVMYPPPYLDNEKSNGTIIHVKGKHLCPSPLFPGPSKPFWVLVVVGGVLACYSLLVTVAFIIFWVRSKRSRLLHSDYMNMTPRRPGPTRKHYQPYAPPRDFAAYRS

SEQ ID NO: 4 - protein, 1033 aa, Homo sapiens
MGAAGLLGVFLALVAPGVLGISCGSPPPILNGRISYYSTPIAVGTVIRYSCSGTFRLIGEKSLLCITKDKVDGTWDKPAPKCEYFNKYSSCPEPIVPGGYKIRGSTPYRHGDSVTFACKTNFSMNGNKSVWCQANNMWGPTRLPTCVSVFPLECPALPMIHNGHHTSENVGSIAPGLSVTYSCESGYLLVGEKIINCLSSGKWSAVPPTCEEARCKSLGRFPNGKVKEPPILRVGVTANFFCDEGYRLQGPPSSRCVIAGQGVAWTKMPVCEEIFCPSPPPILNGRHIGNSLANVSYGSIVTYTCDPDPEEGVNFILIGESTLRCTVDSQKTGTWSGPAPRCELSTSAVQCPHPQILRGRMVSGQKDRYTYNDTVIFACMFGFTLKGSKQIRCNAQGTWEPSAPVCEKECQAPPNILNGQKEDRHMVRFDPGTSIKYSCNPGYVLVGEESIQCTSEGVWTPPVPQCKVAACEATGRQLLTKPQHQFVRPDVNSSCGEGYKLSGSVYQECQGTIPWFMEIRLCKEITCPPPPVIYNGAHTGSSLEDFPYGTTVTYTCNPGPERGVEFSLIGESTIRCTSNDQERGTWSGPAPLCKLSLLAVQCSHVHIANGYKISGKEAPYFYNDTVTFKCYSGFTLKGSSQIRCKADNTWDPEIPVCEKETCQHVRQSLQELPAGSRVELVNTSCQDGYQLTGHAYQMCQDAENGIWFKKIPLCKVIHCHPPPVIVNGKHTGMMAENFLYGNEVSYECDQGFYLLGEKKLQCRSDSKGHGSWSGPSPQCLRSPPVTRCPNPEVKHGYKLNKTHSAYSHNDIVYVDCNPGFIMNGSRVIRCHTDNTWVPGVPTCIKKAFIGCPPPPKTPNGNHTGGNIARFSPGMSILYSCDQGYLLVGEALLLCTHEGTWSQPAPHCKEVNCSSPADMDGIQKGLEPRKMYQYGAVVTLECEDGYMLEGSPQSQCQSDHQWNPPLAVCRSRSLAPVLCGIAAGLILLTFLIVITLYVISKHRARNYYTDTSQKEAFHLEAREVYSVDPYNPAS

SEQ ID NO: 5 - protein, 210 aa, Homo sapiens
MRPRLWLLLAAQLTVLHGNSVLQQTPAYIKVQTNKMVMLSCEAKISLSNMRIYWLRQRQAPSSDSHHEFLALWDSAKGTIHGEEVEQEKIAVFRDASRFILNLTSVKPEDSGIYFCMIVGSPELTFGKGTQLSVVDFLPTTAQPTKKSTLKKRVCRLPRPETQKGPLCSPITLGLLVAGVLVLLVSLGVAIHLCCRRRRARLRFMKQFYK

SEQ ID NO: 6 - protein, 515 aa, Homo sapiens
MEAREPGRPTPTYHLVPNTSQSQVEEDVSSPPQRSSETMQLKKEISLLNGVSLVVGNMIGSGIFVSPKGVLVHTASYGMSLIVWAIGGLFSVVGALCYAELGTTITKSGASYAYILEAFGGFIAFIRLWVSLLVVEPTGQAIIAITFANYIIQPSFPSCDPPYLACRLLAAACICLLTFVNCAYVKWGTRVQDTFTYAKVVALIAIIVMGLVKLCQGHSEHFQDAFEGSSWDMGNLSLALYSALFSYSGWDTLNFVTEEIKNPERNLPLAIGISMPIVTLIYILTNVAYYTVLNISDVLSSDAVAVTFADQTFGMFSWTIPIAVALSCFGGLNASIFASSRLFFVGSREGHLPDLLSMIHIERFTPIPALLFNCTMALIYLIVEDVFQLINYFSFSYWFFVGLSVVGQLYLRWKEPKRPRPLKLSVFFPIVFCICSVFLVIVPLFTDTINSLIGIGIALSGVPFYFMGVYLPESRRPLFIRNVLAAITRGTQQLCFCVLTELDVAEEKKDERKTD

SEQ ID NO: 7 - protein, 445 aa, Homo sapiens
MAAPTPARPVLTHLLVALFGMGSWAAVNGIWVELPVVVKELPEGWSLPSYVSVLVALGNLGLLVVTLWRRLAPGKDEQVPIRVVQVLGMVGTALLASLWHHVAPVAGQLHSVAFLALAFVLALACCASNVTFLPFLSHLPPRFLRSFFLGQGLSALLPCVLALVQGVGRLECPPAPINGTPGPPLDFLERFPASTFFWALTALLVASAAAFQGLLLLLPPPPSVPTGELGSGLQVGAPGAEEEVEESSPLQEPPSQAAGTTPGPDPKAYQLLSARSACLLGLLAATNALTNGVLPAVQSFSCLPYGRLAYHLAVVLGSAANPLACFLAMGVLCRSLAGLGGLSLLGVFCGGYLMALAVLSPCPPLVGTSAGVVLVVLSWVLCLGVFSYVKVAASSLLHGGGRPALLAAGVAIQVGSLLGAVAMFPPTSIYHVFHSRKDCADPCDS

SEQ ID NO: 8 - protein, 277 aa, Homo sapiens
MVRLPLQCVLWGCLLTAVHPEPPTACREKQYLINSQCCSLCQPGQKLVSDCTEFTETECLPCGESEFLDTWNRETHCHQHKYCDPNLGLRVQQKGTSETDTICTCEEGWHCTSEACESCVLHRSCSPGFGVKQIATGVSDTICEPCPVGFFSNVSSAFEKCHPWTSCETKDLVVQQAGTNKTDVVCGPQDRLRALVVIPIIFGILFAILLVLVFIKKVAKKPTNKAPHPKQEPQEINFPDDLPGSNTAAPVQETLHGCQPVTQEDGKESRISVQERQ

SEQ ID NO: 9 - protein, 487 aa, Homo sapiens
MMHFKSGLELTELQNMTVPEDDNISNDSNDFTEVENGQINSKFISDRESRRSLTNSHLEKKKCDEYIPGTTSLGMSVFNLSNAIMGSGILGLAFALANTGILLFLVLLTSVTLLSIYSINLLLICSKETGCMVYEKLGEQVFGTTGKFVIFGATSLQNTGAMLSYLFIVKNELPSAIKFLMGKEETFSAWYVDGRVLVVIVTFGIILPLCLLKNLGYLGYTSGFSLSCMVFFLIVVIYKKFQIPCIVPELNSTISANSTNADTCTPKYVTFNSKTVYALPTIAFAFVCHPSVLPIYSELKDRSQKKMQMVSNISFFAMFVMYFLTAIFGYLTFYDNVQSDLLHKYQSKDDILILTVRLAVIVAVILTVPVLFFTVRSSLFELAKKTKFNLCRHTVVTCILLVVINLLVIFIPSMKDIFGVVGVTSANMLIFILPSSLYLKITDQDGDKGTQRIWAALFLGLGVLFSLVSIPLVIYDWACSSSSDEGH

SEQ ID NO: 10 - protein, 458 aa, Homo sapiens
MNRGVPFRHLLLVLQLALLPAATQGKKVVLGKKGDTVELTCTASQKKSIQFHWKNSNQIKILGNQGSFLTKGPSKLNDRADSRRSLWDQGNFPLIIKNLKIEDSDTYICEVEDQKEEVQLLVFGLTANSDTHLLQGQSLTLTLESPPGSSPSVQCRSPRGKNIQGGKTLSVSQLELQDSGTWTCTVLQNQKKVEFKIDIVVLAFQKASSIVYKKEGEQVEFSFPLAFTVEKLTGSGELWWQAERASSSKSWITFDLKNKEVSVKRVTQDPKLQMGKKLPLHLTLPQALPQYAGSGNLTLALEAKTGKLHQEVNLVVMRATQLQKNLTCEVWGPTSPKLMLSLKLENKEAKVSKREKAVWVLNPEAGMWQCLLSDSGQVLLESNIKVLPTWSTPVQPMALIVLGGVAGLLLFIGLGIFFCVRCRHRRRQAERMSQIKRLLSEKKTCQCPHRFQKTCSPI

SEQ ID NO: 11 - protein, 281 aa, Homo sapiens
MSAQESCLSLIKYFLFVFNLFFFVLGSLIFCFGIWILIDKTSFVSFVGLAFVPLQIWSKVLAISGIFTMGIALLGCVGALKELRCLLGLYFGMLLLLFATQITLGILISTQRAQLERSLRDVVEKTIQKYGTNPEETAAEESWDYVQFQLRCCGWHYPQDWFQVLILRGNGSEAHRVPCSCYNLSATNDSTILDKVILPQLSRLGHLARSRHSADICAVPAESHIYREGCAQGLQKWLHNNLISIVGICLGVGLLELGFMTLSIFLCRNLDHVYNRLARYR

SEQ ID NO: 12 - protein, 661 aa, Homo sapiens
MAFDVSCFFWVVLFSAGCKVITSWDQMCIEKEANKTYNCENLGLSEIPDTLPNTTEFLEFSFNFLPTIHNRTFSRLMNLTFLDLTRCQINWIHEDTFQSHHQLSTLVLTGNPLIFMAETSLNGPKSLKHLFLIQTGISNLEFIPVHNLENLESLYLGSNHISSIKFPKDFPARNLKVLDFQNNAIHYISREDMRSLEQAINLSLNFNGNNVKGIELGAFDSTIFQSLNFGGTPNLSVIFNGLQNSTTQSLWLGTFEDIDDEDISSAMLKGLCEMSVESLNLQEHRFSDISSTTFQCFTQLQELDLTATHLKGLPSGMKGLNLLKKLVLSVNHFDQLCQISAANFPSLTHLYIRGNVKKLHLGVGCLEKLGNLQTLDLSHNDIEASDCCSLQLKNLSHLQTLNLSHNEPLGLQSQAFKECPQLELLDLAFTRLHINAPQSPFQNLHFLQVLNLTYCFLDTSNQHLLAGLPVLRHLNLKGNHFQDGTITKTNLLQTVGSLEVLILSSCGLLSIDQQAFHSLGKMSHVDLSHNSLTCDSIDSLSHLKGIYLNLAANSINIISPRLLPILSQQSTINLSHNPLDCTCSNIHFLTWYKENLHKLEGSEETTCANPPSLRGVKLSDVKLSCGITAIGIFFLIVFLLLLAILLFFAVKYLLRWKYQHI

SEQ ID NO: 13 - protein, 823 aa, Homo sapiens
MGGRVFLVFLAFCVWLTLPGAETQDSRGCARWCPQDSSCVNATACRCNPGFSSFSEIITTPMETCDDINECATLSKVSCGKFSDCWNTEGSYDCVCSPGYEPVSGAKTFKNESENTCQDVDECQQNPRLCKSYGTCVNTLGSYTCQCLPGFKLKPEDPKLCTDVNECTSGQNPCHSSTHCLNNVGSYQCRCRPGWQPIPGSPNGPNNTVCEDVDECSSGQHQCDSSTVCFNTVGSYSCRCRPGWKPRHGIPNNQKDTVCEDMTFSTWTPPPGVHSQTLSRFFDKVQDLGRDYKPGLANNTIQSILQALDELLEAPGDLETLPRLQQHCVASHLLDGLEDVLRGLSKNLSNGLLNFSYPAGTELSLEVQKQVDRSVTLRQNQAVMQLDWNQAQKSGDPGPSVVGLVSIPGMGKLLAEAPLVLEPEKQMLLHETHQGLLQDGSPILLSDVISAFLSNNDTQNLSSPVTFTFSHRSVIPRQKVLCVFWEHGQNGCGHWATTGCSTIGTRDTSTICRCTHLSSFAVLMAHYDVQEEDPVLTVITYMGLSVSLLCLLLAALTFLLCKAIQNTSTSLHLQLSLCLFLAHLLFLVAIDQTGHKVLCSIIAGTLHYLYLATLTWMLLEALYLFLTARNLTVVNYSSINRFMKKLMFPVGYGVPAVTVAISAASRPHLYGTPSRCWLQPEKGFIWGFLGPVCAIFSVNLVLFLVTLWILKNRLSSLNSEVSTLRNTRMLAFKATAQLFILGCTWCLGILQVGPAARVMAYLFTIINSLQGVFIFLVYCLLSQQVREQYGKWSKGIRKLKTESEMHTLSSSAKADTSKPSTVN

SEQ ID NO: 14 - protein, 364 aa, Homo sapiens
MPLLLLLPLLWAGALAMDPNFWLQVQESVTVQEGLCVLVPCTFFHPIPYYDKNSPVHGYWFREGAIISRDSPVATNKLDQEVQEETQGRFRLLGDPSRNNCSLSIVDARRRDNGSYFFRMERGSTKYSYKSPQLSVHVTDLTHRPKILIPGTLEPGHSKNLTCSVSWACEQGTPPIFSWLSAAPTSLGPRTTHSSVLIITPRPQDHGTNLTCQVKFAGAGVTTERTIQLNVTYVPQNPTTGIFPGDGSGKQETRAGVVHGAIGGAGVTALLALCLCLIFFIVKTHRRKAARTAVGRNDTHPTTGSASPKHQKKSKLHGPTETSSCSGAAPTVEMDEELHYASLNFHGMNPSKDTSTEYSEVRTQ

SEQ ID NO: 15 - protein, 2146 aa, Homo sapiens
MAFWTQLMLLLWKNFMYRRRQPVQLLVELLWPLFLFFILVAVRHSHPPLEHHECHFPNKPLPSAGTVPWLQGLICNVNNTCFPQLTPGEEPGRLSNFNDSLVSRLLADARTVLGGASAHRTLAGLGKLIATLRAARSTAQPQPTKQSPLEPPMLDVAELLTSLLRTESLGLALGQAQEPLHSLLEAAEDLAQELLALRSLVELRALLQRPRGTSGPLELLSEALCSVRGPSSTVGPSLNWYEASDLMELVGQEPESALPDSSLSPACSELIGALDSHPLSRLLWRRLKPLILGKLLFAPDTPFTRKLMAQVNRTFEELTLLRDVREVWEMLGPRIFTFMNDSSNVAMLQRLLQMQDEGRRQPRPGGRDHMEALRSFLDPGSGGYSWQDAHADVGHLVGTLGRVTECLSLDKLEAAPSEAALVSRALQLLAEHRFWAGVVFLGPEDSSDPTEHPTPDLGPGHVRIKIRMDIDVVTRTNKIRDRFWDPGPAADPLTDLRYVWGGFVYLQDLVERAAVRVLSGANPRAGLYLQQMPYPCYVDDVFLRVLSRSLPLFLTLAWIYSVTLTVKAVVREKETRLRDTMRAMGLSRAVLWLGWFLSCLGPFLLSAALLVLVLKLGDILPYSHPGVVFLFLAAFAVATVTQSFLLSAFFSRANLAAACGGLAYFSLYLPYVLCVAWRDRLPAGGRVAASLLSPVAFGFGCESLALLEEQGEGAQWHNVGTRPTADVFSLAQVSGLLLLDAALYGLATWYLEAVCPGQYGIPEPWNFPFRRSYWCGPRPPKSPAPCPTPLDPKVLVEEAPPGLSPGVSVRSLEKRFPGSPQPALRGLSLDFYQGHITAFLGHNGAGKTTTLSILSGLFPPSGGSAFILGHDVRSSMAAIRPHLGVCPQYNVLFDMLTVDEHVWFYGRLKGLSAAVVGPEQDRLLQDVGLVSKQSVQTRHLSGGMQRKLSVAIAFVGGSQVVILDEPTAGVDPASRRGIWELLLKYREGRTLILSTHHLDEAELLGDRVAVVAGGRLCCCGSPLFLRRHLGSGYYLTLVKARLPLTTNEKADTDMEGSVDTRQEKKNGSQGSRVGTPQLLALVQHWVPGARLVEELPHELVLVLPYTGAHDGSFATLFRELDTRLAELRLTGYGISDTSLEEIFLKVVEECAADTDMEDGSCGQHLCTGIAGLDVTLRLKMPPQETALENGEPAGSAPETDQGSGPDAVGRVQGWALTRQQLQALLLKRFLLARRSRRGLFAQIVLPALFVGLALVFSLIVPPFGHYPALRLSPTMYGAQVSFFSEDAPGDPGRARLLEALLQEAGLEEPPVQHSSHRFSAPEVPAEVAKVLASGNWTPESPSPACQCSRPGARRLLPDCPAAAGGPPPPQAVTGSGEVVQNLTGRNLSDFLVKTYPRLVRQGLKTKKWVNEVRYGGFSLGGRDPGLPSGQELGRSVEELWALLSPLPGGALDRVLKNLTAWAHSLDAQDSLKIWFNNKGWHSMVAFVNRASNAILRAHLPPGPARHAHSITTLNHPLNLTKEQLSEGALMASSVDVLVSICVVFAMSFVPASFTLVLIEERVTRAKHLQLMGGLSPTLYWLGNFLWDMCNYLVPACIVVLIFLAFQQRAYVAPANLPALLLLLLLYGWSITPLMYPASFFFSVPSTAYVVLTCINLFIGINGSMATFVLELFSDQKLQEVSRILKQVFLIFPHFCLGRGLIDMVRNQAMADAFERLGDRQFQSPLRWEVVGKNLLAMVIQGPLFLLFTLLLQHRSQLLPQPRVRSLPLLGEEDEDVARERERVVQGATQGDVLVLRNLTKVYRGQRMPAVDRLCLGIPPGECFGLLGVNGAGKTSTFRMVTGDTLASRGEAVLAGHSVAREPSAAHLSMGYCPQSDAIFELLTGREHLELLARLRGVPEAQVAQTAGSGLARLGLSWYADRPAGTYSGGNKRKLATALALVGDPAVVFLDEPTTGMDPSARRFLWNSLLAVVREGRSVMLTSHSMEECEALCSRLAIMVNGRFRCLGSPQHLKGRFAAGHTLTLRVPAARSQPAAAFVAAEFPGAELREAHGGRLRFQLPPGGRCALARVFGELAVHGAEHGVEDFSVSQTMLEEVFLYFSKDQGKDEDTEEQKEAGVGVDPAPGLQHPKRVSQFLDDPSTAETVL

SEQ ID NO: 16 - protein, 635 aa, Homo sapiens
MSVGVSTSAPLSPTSGTSVGMSTFSIMDYVVFVLLLVLSLAIGLYHACRGWGRHTVGELLMADRKMGCLPVALSLLATFQSAVAILGVPSEIYRFGTQYWFLGCCYFLGLLIPAHIFIPVFYRLHLTSAYEYLELRFNKTVRVCGTVTFIFQMVIYMGVVLYAPSLALNAVTGFDLWLSVLALGIVCTVYTALGGLKAVIWTDVFQTLVMFLGQLAVIIVGSAKVGGLGRVWAVASQHGRISGFELDPDPFVRHTFWTLAFGGVFMMLSLYGVNQAQVQRYLSSRTEKAAVLSCYAVFPFQQVSLCVGCLIGLVMFAYYQEYPMSIQQAQAAPDQFVLYFVMDLLKGLPGLPGLFIACLFSGSLSTISSAFNSLATVTMEDLIRPWFPEFSEARAIMLSRGLAFGYGLLCLGMAYISSQMGPVLQAAISIFGMVGGPLLGLFCLGMFFPCANPPGAVVGLLAGLVMAFWIGIGSIVTSMGSSMPPSPSNGSSFSLPTNLTVATVTTLMPLTTFSKPTGLQRFYSLSYLWYSAHNSTTVIVVGLIVSLLTGRMRGRSLNPATIYPVLPKLLSLLPLSCQKRLHCRSYGQDHLDTGLFPEKPRNGVLGDSRDKEAMALDGTAYQGSSSTCILQETSL

SEQ ID NO: 17 - protein, 400 aa, Homo sapiens
MATLLLLLGVLVVSPDALGSTTAVQTPTSGEPLVSTSEPLSSKMYTTSITSDPKADSTGDQTSALPPSTSINEGSPLWTSIGASTGSPLPEPTTYQEVSIKMSSVPQETPHATSHPAVPITANSLGSHTVTGGTITTNSPETSSRTSGAPVTTAASSLETSRGTSGPPLTMATVSLETSKGTSGPPVTMATDSLETSTGTTGPPVTMTTGSLEPSSGASGPQVSSVKLSTMMSPTTSTNASTVPFRNPDENSRGMLPVAVLVALLAVIVLVALLLLWRRRQKRRTGALVLSRGGKRNGVVDAWAGPAQVPEEGAVTVTVGGSGGDKGSGFPDGEGSSRRPTLTTFFGRRKSRQGSLAMEELKSGSGPSLKGEEEPLVASEDGAVDAPAPDEPEGGDGAAP

SEQ ID NO: 18 - protein, 1170 aa, Homo sapiens
MKDSCITVMAMALLSGFFFFAPASSYNLDVRGARSFSPPRAGRHFGYRVLQVGNGVIVGAPGEGNSTGSLYQCQSGTGHCLPVTLRGSNYTSKYLGMTLATDPTDGSILACDPGLSRTCDQNTYLSGLCYLFRQNLQGPMLQGRPGFQECIKGNVDLVFLFDGSMSLQPDEFQKILDFMKDVMKKLSNTSYQFAAVQFSTSYKTEFDFSDYVKRKDPDALLKHVKHMLLLTNTFGAINYVATEVFREELGARPDATKVLIIITDGEATDSGNIDAAKDIIRYIIGIGKHFQTKESQETLHKFASKPASEFVKILDTFEKLKDLFTELQKKIYVIEGTSKQDLTSFNMELSSSGISADLSRGHAVVGAVGAKDWAGGFLDLKADLQDDTFIGNEPLTPEVRAGYLGYTVTWLPSRQKTSLLASGAPRYQHMGRVLLFQEPQGGGHWSQVQTIHGTQIGSYFGGELCGVDVDQDGETELLLIGAPLFYGEQRGGRVFIYQRRQLGFEEVSELQGDPGYPLGRFGEAITALTDINGDGLVDVAVGAPLEEQGAVYIFNGRHGGLSPQPSQRIEGTQVLSGIQWFGRSIHGVKDLEGDGLADVAVGAESQMIVLSSRPVVDMVTLMSFSPAEIPVHEVECSYSTSNKMKEGVNITICFQIKSLIPQFQGRLVANLTYTLQLDGHRTRRRGLFPGGRHELRRNIAVTTSMSCTDFSFHFPVCVQDLISPINVSLNFSLWEEEGTPRDQRAQGKDIPPILRPSLHSETWEIPFEKNCGEDKKCEANLRVSFSPARSRALRLTAFASLSVELSLSNLEEDAYWVQLDLHFPPGLSFRKVEMLKPHSQIPVSCEELPEESRLLSRALSCNVSSPIFKAGHSVALQMMFNTLVNSSWGDSVELHANVTCNNEDSDLLEDNSATTIIPILYPINILIQDQEDSTLYVSFTPKGPKIHQVKHMYQVRIQPSIHDHNIPTLEAVVGVPQPPSEGPITHQWSVQMEPPVPCHYEDLERLPDAAEPCLPGALFRCPVVFRQEILVQVIGTLELVGEIEASSMFSLCSSLSISFNSSKHFHLYGSNASLAQVVMKVDVVYEKQMLYLYVLSGIGGLLLLLLIFIVLYKVGFFKRNLKEKMEAGRGVPNGIPAEDSEQLASGQEAGDPGCLKPLHEKDSESGGGKD

SEQ ID NO: 19 - protein, 662 aa, Homo sapiens
MEPLVTWVVPLLFLFLLSRQGAACRTSECCFQDPPYPDADSGSASGPRDLRCYRISSDRYECSWQYEGPTAGVSHFLRCCLSSGRCCYFAAGSATRLQFSDQAGVSVLYTVTLWVESWARNQTEKSPEVTLQLYNSVKYEPPLGDIKVSKLAGQLRMEWETPDNQVGAEVQFRHRTPSSPWKLGDCGPQDDDTESCLCPLEMNVAQEFQLRRRQLGSQGSSWSKWSSPVCVPPENPPQPQVRFSVEQLGQDGRRRLTLKEQPTQLELPEGCQGLAPGTEVTYRLQLHMLSCPCKAKATRTLHLGKMPYLSGAAYNVAVISSNQFGPGLNQTWHIPADTHTEPVALNISVGTNGTTMYWPARAQSMTYCIEWQPVGQDGGLATCSLTAPQDPDPAGMATYSWSRESGAMGQEKCYYITIFASAHPEKLTLWSTVLSTYHFGGNASAAGTPHHVSVKNHSLDSVSVDWAPSLLSTCPGVLKEYVVRCRDEDSKQVSEHPVQPTETQVTLSGLRAGVAYTVQVRADTAWLRGVWSQPQRFSIEVQVSDWLIFFASLGSFLSILLVGVLGYLGLNRAARHLCPPLPTPCASSAIEFPGGKETWQWINPVDFQEEASLQEALVVEMSWDKGERTEPLEKTELPEGAPELALDTELSLEDGDRCKAKM

SEQ ID NO: 20 - protein, 650 aa, Homo sapiens
MTPILTVLICLGLSLGPRTHVQAGHLPKPTLWAEPGSVITQGSPVTLRCQGGQETQEYRLYREKKTALWITRIPQELVKKGQFPIPSITWEHAGRYRCYYGSDTAGRSESSDPLELVVTGAYIKPTLSAQPSPVVNSGGNVILQCDSQVAFDGFSLCKEGEDEHPQCLNSQPHARGSSRAIFSVGPVSPSRRWWYRCYAYDSNSPYEWSLPSDLLELLVLGVSKKPSLSVQPGPIVAPEETLTLQCGSDAGYNRFVLYKDGERDFLQLAGAQPQAGLSQANFTLGPVSRSYGGQYRCYGAHNLSSEWSAPSDPLDILIAGQFYDRVSLSVQPGPTVASGENVTLLCQSQGWMQTFLLTKEGAADDPWRLRSTYQSQKYQAEFPMGPVTSAHAGTYRCYGSQSSKPYLLTHPSDPLELVVSGPSGGPSSPTTGPTSTSGPEDQPLTPTGSDPQSGLGRHLGVVIGILVAVILLLLLLLLLFLILRHRRQGKHWTSTQRKADFQHPAGAVGPEPTDRGLQWRSSPAADAQEENLYAAVKHTQPEDGVEMDTRSPHDEDPQAVTYAEVKHSRPRREMASPPSPLSGEFLDTKDRQAEEDRQMDTEAAASEAPQDVTYAQLHSLTLRREATEPPPSQEGPSPAVPSIYATLAIH

SEQ ID NO: 21 - protein, 655 aa, Homo sapiens
MVAPKSHTDDWAPGPFSSKPQRSQLQIFSSVLQTSLLFLLMGLRASGKDSAPTVVSGILGGSVTLPLNISVDTEIENVIWIGPKNALAFARPKENVTIMVKSYLGRLDITKWSYSLCISNLTLNDAGSYKAQINQRNFEVTTEEEFTLFVYEQLQEPQVTMKSVKVSENFSCNITLMCSVKGAEKSVLYSWTPREPHASESNGGSILTVSRTPCDPDLPYICTAQNPVSQRSSLPVHVGQFCTDPGASRGGTTGETVVGVLGEPVTLPLALPACRDTEKVVWLFNTSIISKEREEAATADPLIKSRDPYKNRVWVSSQDCSLKISQLKIEDAGPYHAYVCSEASSVTSMTHVTLLIYRRLRKPKITWSLRHSEDGICRISLTCSVEDGGNTVMYTWTPLQKEAVVSQGESHLNVSWRSSENHPNLTCTASNPVSRSSHQFLSENICSGPERNTKLWIGLFLMVCLLCVGIFSWCIWKRKGRCSVPAFCSSQAEAPADTPEPTAGHTLYSVLSQGYEKLDTPLRPARQQPTPTSDSSSDSNLTTEEDEDRPEVHKPISGRYEVFDQVTQEGAGHDPAPEGQADYDPVTPYVTEVESVVGENTMYAQVFNLQGKTPVSQKEESSATIYCSIRKPQVVPPPQQNDLEIPESPTYENFT

SEQ ID NO: 22 - protein, 775 aa, Homo sapiens
MLQGLLPVSLLLSVAVSAIKELPGVKKYEVVYPIRLHPLHKREAKEPEQQEQFETELKYKMTINGKIAVLYLKKNKNLLAPGYTETYYNSTGKEITTSPQIMDDCYYQGHILNEKVSDASISTCRGLRGYFSQGDQRYFIEPLSPIHRDGQEHALFKYNPDEKNYDSTCGMDGVLWAHDLQQNIALPATKLVKLKDRKVQEHEKYIEYYLVLDNGEFKRYNENQDEIRKRVFEMANYVNMLYKKLNTHVALVGMEIWTDKDKIKITPNASFTLENFSKWRGSVLSRRKRHDIAQLITATELAGTTVGLAFMSTMCSPYSVGVVQDHSDNLLRVAGTMAHEMGHNFGMFHDDYSCKCPSTICVMDKALSFYIPTDFSSCSRLSYDKFFEDKLSNCLFNAPLPTDIISTPICGNQLVEMGEDCDCGTSEECTNICCDAKTCKIKATFQCALGECCEKCQFKKAGMVCRPAKDECDLPEMCNGKSGNCPDDRFQVNGFPCHHGKGHCLMGTCPTLQEQCTELWGPGTEVADKSCYNRNEGGSKYGYCRRVDDTLIPCKANDTMCGKLFCQGGSDNLPWKGRIVTFLTCKTFDPEDTSQEIGMVANGTKCGDNKVCINAECVDIEKAYKSTNCSSKCKGHAVCDHELQCQCEEGWIPPDCDDSSVVFHFSIVVGVLFPMAVIFVVVAMVIRHQSSREKQKKDQRPLSTTGTRPHKQKRKPQMVKAVQPQEMSQMKPHVYDLPVEGNEPPASFHKDTNALPPTVFKDNPVSTPKDSNPKA

SEQ ID NO: 23 - protein, 163 aa, Homo sapiens
MSLLLLVVSALHILILILLFVATLDKSWWTLPGKESLNLWYDCTWNNDTKTWACSNVSENGWLKAVQVLMVLSLILCCLSFILFMFQLYTMRRGGLFYATGLCQLCTSVAVFTGALIYAIHAEEILEKHPRGGSFGYCFALAWVAFPLALVSGIIYIHLRKRE

SEQ ID NO: 24 - protein, 713 aa, Homo sapiens
MLLATLLLLLLGGALAHPDRIIFPNHACEDPPAVLLEVQGTLQRPLVRDSRTSPANCTWLILGSKEQTVTIRFQKLHLACGSERLTLRSPLQPLISLCEAPPSPLQLPGGNVTITYSYAGARAPMGQGFLLSYSQDWLMCLQEEFQCLNHRCVSAVQRCDGVDACGDGSDEAGCSSDPFPGLTPRPVPSLPCNVTLEDFYGVFSSPGYTHLASVSHPQSCHWLLDPHDGRRLAVRFTALDLGFGDAVHVYDGPGPPESSRLLRSLTHFSNGKAVTVETLSGQAVVSYHTVAWSNGRGFNATYHVRGYCLPWDRPCGLGSGLGAGEGLGERCYSEAQRCDGSWDCADGTDEEDCPGCPPGHFPCGAAGTSGATACYLPADRCNYQTFCADGADERRCRHCQPGNFRCRDEKCVYETWVCDGQPDCADGSDEWDCSYVLPRKVITAAVIGSLVCGLLLVIALGCTCKLYAIRTQEYSIFAPLSRMEAEIVQQQAPPSYGQLIAQGAIPPVEDFPTENPNDNSVLGNLRSLLQILRQDMTPGGGPGARRRQRGRLMRRLVRRLRRWGLLPRTNTPARASEARSQVTPSAAPLEALDGGTGPAREGGAVGGQDGEQAPPLPIKAPLPSASTSPAPTTVPEAPGPLPSLPLEPSLLSGVVQALRGRLLPSLGPPGPTRSPPGPHTAVLALEDEDDVLLVPLAEPGVWVAEAEDEPLLT

SEQ ID NO: 25 - protein, 1306 aa, Homo sapiens
MTMYLWLKLLAFGFAFLDTEVFVTGQSPTPSPTGLTTAKMPSVPLSSDPLPTHTTAFSPASTFERENDFSETTTSLSPDNTSTQVSPDSLDNASAFNTTGVSSVQTPHLPTHADSQTPSAGTDTQTFSGSAANAKLNPTPGSNAISDVPGERSTASTFPTDPVSPLTTTLSLAHHSSAALPARTSNTTITANTSDAYLNASETTTLSPSGSAVISTTTIATTPSKPTCDEKYANITVDYLYNKETKLFTAKLNVNENVECGNNTCTNNEVHNLTECKNASVSISHNSCTAPDKTLILDVPPGVEKFQLHDCTQVEKADTTICLKWKNIETFTCDTQNITYRFQCGNMIFDNKEIKLENLEPEHEYKCDSEILYNNHKFTNASKIIKTDFGSPGEPQIIFCRSEAAHQGVITWNPPQRSFHNFTLCYIKETEKDCLNLDKNLIKYDLQNLKPYTKYVLSLHAYIIAKVQRNGSAAMCHFTTKSAPPSQVWNMTVSMTSDNSMHVKCRPPRDRNGPHERYHLEVEAGNTLVRNESHKNCDFRVKDLQYSTDYTFKAYFHNGDYPGEPFILHHSTSYNSKALIAFLAFLIIVTSIALLVVLYKIYDLHKKRSCNLDEQQELVERDDEKQLMNVEPIHADILLETYKRKIADEGRLFLAEFQSIPRVFSKFPIKEARKPFNQNKNRYVDILPYDYNRVELSEINGDAGSNYINASYIDGFKEPRKYIAAQGPRDETVDDFWRMIWEQKATVIVMVTRCEEGNRNKCAEYWPSMEEGTRAFGDVVVKINQHKRCPDYIIQKLNIVNKKEKATGREVTHIQFTSWPDHGVPEDPHLLLKLRRRVNAFSNFFSGPIVVHCSAGVGRTGTYIGIDAMLEGLEAENKVDVYGYVVKLRRQRCLMVQVEAQYILIHQALVEYNQFGETEVNLSELHPYLHNMKKRDPPSEPSPLEAEFQRLPSYRSWRTQHIGNQEENKSKNRNSNVIPYDYNRVPLKHELEMSKESEHDSDESSDDDSDSEEPSKYINASFIMSYWKPEVMIAAQGPLKETIGDFWQMIFQRKVKVIVMLTELKHGDQEICAQYWGEGKQTYGDIEVDLKDTDKSSTYTLRVFELRHSKRKDSRTVYQYQYTNWSVEQLPAEPKELISMIQVVKQKLPQKNSSEGNKHHKSTPLLIHCRDGSQQTGIFCALLNLLESAETEEVVDIFQVVKALRKARPGMVSTFEQYQFLYDVIASTYPAQNGQVKKNNHQEDKIEFDNEVDKVKQDANCVNPLGAPEKLPEAKEQAEGSEPTSGTEGPEHSVNGPASPALNQGS

SEQ ID NO: 26 - protein, 369 aa, Homo sapiens
MLKPSLPFTSLLFLQLPLLGVGLNTTILTPNGNEDTTADFFLTTMPTDSLSVSTLPLPEVQCFVFNVEYMNCTWNSSSEPQPTNLTLHYWYKNSDNDKVQKCSHYLFSEEITSGCQLQKKEIHLYQTFVVQLQDPREPRRQATQMLKLQNLVIPWAPENLTLHKLSESQLELNWNNRFLNHCLEHLVQYRTDWDHSWTEQSVDYRHKFSLPSVDGQKRYTFRVRSRFNPLCGSAQHWSEWSHPIHWGSNTSKENPFLFALEAVVISVGSMGLIISLLCVYFWLERTMPRIPTLKNLEDLVTEYHGNFSAWSGVSKGLAESLQPDYSERLCLVSEIPPKGGALGEGPGASPCNQHSPYWAPPCYTLKPET

SEQ ID NO: 27 - protein, 184 aa, Homo sapiens
MLQMAGQCSQNEYFDSLLHACIPCQLRCSSNTPPLTCQRYCNASVTNSVKGTNAILWTCLGLSLIISLAVFVLMFLLRKINSEPLKDEFKNTGSGLLGMANIDLEKSRTGDEIILPRGLEYTVEECTCEDCIKSKPKVDSDHCFPLPAMEEGATILVTTKTNDYCKSLPAALSATEIEKSISAR

SEQ ID NO: 28 - protein, 468 aa, Homo sapiens
MAPPPARVHLGAFLAVTPNPGSAASGTEAAAATPSKVWGSSAGRIEPRGGGRGALPTSMGQHGPSARARAGRAPGPRPAREASPRLRVHKTFKFVVVGVLLQVVPSSAATIKLHDQSIGTQQWEHSPLGELCPPGSHRSEHPGACNRCTEGVGYTNASNNLFACLPCTACKSDEEERSPCTTTRNTACQCKPGTFRNDNSAEMCRKCSRGCPRGMVKVKDCTPWSDIECVHKESGNGHNIWVILVVTLVVPLLLVAVLIVCCCIGSGCGGDPKCMDRVCFWRLGLLRGPGAEDNAHNEILSNADSLSTFVSEQQMESQEPADLTGVTVQSPGEAQCLLGPAEAEGSQRRRLLVPANGADPTETLMLFFDKFANIVPFDSWDQLMRQLDLTKNEIDVVRAGTAGPGDALYAMLMKWVNKTGRNASIHTLLDALERMEERHAREKIQDLLVDSGKFIYLEDGTGSAVSLE

SEQ ID NO: 29 - protein, 335 aa, Homo sapiens
MAGSPTCLTLIYILWQLTGSAASGPVKELVGSVGGAVTFPLKSKVKQVDSIVWTFNTTPLVTIQPEGGTIIVTQNRNRERVDFPDGGYSLKLSKLKKNDSGIYYVGIYSSSLQQPSTQEYVLHVYEHLSKPKVTMGLQSNKNGTCVTNLTCCMEHGEEDVIYTWKALGQAANESHNGSILPISWRWGESDMTFICVARNPVSRNFSSPILARKLCEGAADDPDSSMVLLCLLLVPLLLSLFVLGLFLWFLKRERQEEYIEEKKRVDICRETPNICPHSGENTEYDTIPHTNRTILKEDPANTVYSTVEIPKKMENPHSLLTMPDTPRLFAYENVI

SEQ ID NO: 30 - protein, 461 aa, Homo sapiens
MAPVAVWAALAVGLELWAAAHALPAQVAFTPYAPEPGSTCRLREYYDQTAQMCCSKCSPGQHAKVFCTKTSDTVCDSCEDSTYTQLWNWVPECLSCGSRCSSDQVETQACTREQNRICTCRPGWYCALSKQEGCRLCAPLRKCRPGFGVARPGTETSDVVCKPCAPGTFSNTTSSTDICRPHQICNVVAIPGNASMDAVCTSTSPTRSMAPGAVHLPQPVSTRSQHTQPTPEPSTAPSTSFLLPMGPSPPAEGSTGDFALPVGLIVGVTALGLLIIGVVNCVIMTQVKKKPLCLQREAKVPHLPADKARGTQGPEQQHLLITAPSSSSSSLESSASALDRRAPTRNQPQAPGVEASGAGEARASTGSSDSSPGGHGTQVNVTCIVNVCSSSDHSSQCSSQASSTMGDTDSSPSESPKDEQVPFSKEECAFRSQLETPETLLGSTEEKPLPLGVPDAGMKPS

SEQ ID NO: 31 - protein, 287 aa, Homo sapiens
MSPHPTALLGLVLCLAQTIHTQEEDLPRPSISAEPGTVIPLGSHVTFVCRGPVGVQTFRLERESRSTYNDTEDVSQASPSESEARFRIDSVSEGNAGPYRCIYYKPPKWSEQSDYLELLVKETSGGPDSPDTEPGSSAGPTQRPSDNSHNEHAPASQGLKAEHLYILIGVSVVFLFCLLLLVLFCLHRQNQIKQGPPRSKDEEQKPQQRPDLAVDVLERTADKATVNGLPEKDRETDTSALAAGSSQEVTYAQLDHWALTQRTARAVSPQSTKPMAESITYAAVARH

SEQ ID NO: 32 - protein, 786 aa, Homo sapiens
MTSIFHFAIIFMLILQIRIQLSEESEFLVDRSKNGLIHVPKDLSQKTTILNISQNYISELWTSDILSLSKLRILIISHNRIQYLDISVFKFNQELEYLDLSHNKLVKISCHPTVNLKHLDLSFNAFDALPICKEFGNMSQLKFLGLSTTHLEKSSVLPIAHLNISKVLLVLGETYGEKEDPEGLQDFNTESLHIVFPTNKEFHFILDVSVKTVANLELSNIKCVLEDNKCSYFLSILAKLQTNPKLSNLTLNNIETTWNSFIRILQLVWHTTVWYFSISNVKLQGQLDFRDFDYSGTSLKALSIHQVVSDVFGFPQSYIYEIFSNMNIKNFTVSGTRMVHMLCPSKISPFLHLDFSNNLLTDTVFENCGHLTELETLILQMNQLKELSKIAEMTTQMKSLQQLDISQNSVSYDEKKGDCSWTKSLLSLNMSSNILTDTIFRCLPPRIKVLDLHSNKIKSIPKQVVKLEALQELNVAFNSLTDLPGCGSFSSLSVLIIDHNSVSHPSADFFQSCQKMRSIKAGDNPFQCTCELGEFVKNIDQVSSEVLEGWPDSYKCDYPESYRGTLLKDFHMSELSCNITLLIVTIVATMLVLAVTVTSLCSYLDLPWYLRMVCQWTQTRRRARNIPLEELQRNLQFHAFISYSGHDSFWVKNELLPNLEKEGMQICLHERNFVPGKSIVENIITCIEKSYKSIFVLSPNFVQSEWCHYELYFAHHNLFHEGSNSLILILLEPIPQYSIPSSYHKLKSLMARRTYLEWPKEKSKRGLFWANLRAAINIKLTEQAKK

SEQ ID NO: 33 - protein, 1049 aa, Homo sapiens
MVFPMWTLKRQILILFNIILISKLLGARWFPKTLPCDVTLDVPKNHVIVDCTDKHLTEIPGGIPTNTTNLTLTINHIPDISPASFHRLDHLVEIDFRCNCVPIPLGSKNNMCIKRLQIKPRSFSGLTYLKSLYLDGNQLLEIPQGLPPSLQLLSLEANNIFSIRKENLTELANIEILYLGQNCYYRNPCYVSYSIEKDAFLNLTKLKVLSLKDNNVTAVPTVLPSTLTELYLYNNMIAKIQEDDFNNLNQLQILDLSGNCPRCYNAPFPCAPCKNNSPLQIPVNAFDALTELKVLRLHSNSLQHVPPRWFKNINKLQELDLSQNFLAKEIGDAKFLHFLPSLIQLDLSFNFELQVYRASMNLSQAFSSLKSLKILRIRGYVFKELKSFNLSPLHNLQNLEVLDLGTNFIKIANLSMFKQFKRLKVIDLSVNKISPSGDSSEVGFCSNARTSVESYEPQVLEQLHYFRYDKYARSCRFKNKEASFMSVNESCYKYGQTLDLSKNSIFFVKSSDFQHLSFLKCLNLSGNLISQTLNGSEFQPLAELRYLDFSNNRLDLLHSTAFEELHKLEVLDISSNSHYFQSEGITHMLNFTKNLKVLQKLMMNDNDISSSTSRTMESESLRTLEFRGNHLDVLWREGDNRYLQLFKNLLKLEELDISKNSLSFLPSGVFDGMPPNLKNLSLAKNGLKSFSWKKLQCLKNLETLDLSHNQLTTVPERLSNCSRSLKNLILKNNQIRSLTKYFLQDAFQLRYLDLSSNKIQMIQKTSFPENVLNNLKMLLLHHNRFLCTCDAVWFVWWVNHTEVTIPYLATDVTCVGPGAHKGQSVISLDLYTCELDLTNLILFSLSISVSLFLMVMMTASHLYFWDVWYIYHFCKAKIKGYQRLISPDCCYDAFIVYDTKDPAVTEWVLAELVAKLEDPREKHFNLCLEERDWLPGQPVLENLSQSIQLSKKTVFVMTDKYAKTENFKIAFYLSHQRLMDEKVDVIILIFLEKPFQKSKFLQLRKRLCGSSVLEWPTNPQAHPYFWQCLKNALATDNHVAYSQVFKETV

SEQ ID NO: 34 - protein, 241 aa, Homo sapiens
MAQHGAMGAFRALCGLALLCALSLGQRPTGGPGCGPGRLLLGTGTDARCCRVHTTRCCRDYPGEECCSEWDCMCVQPEFHCGDPCCTTCRHHPCPPGQGVQSQGKFSFGFQCIDCASGTFSGGHEGHCKPWTDCTQFGFLTVFPGNKTHNAVCVPGSPPAEPLGWLTVVLLAVAACVLLLTSAQLGLHIWQLRSQCMWPRETQLLLEVPPSTEDARSCQFPEEERGERSAEEKGRLGDLWV

SEQ ID NO: 35 - protein, 595 aa, Homo sapiens
MRVLLAALGLLFLGALRAFPQDRPFEDTCHGNPSHYYDKAVRRCCYRCPMGLFPTQQCPQRPTDCRKQCEPDYYLDEADRCTACVTCSRDDLVEKTPCAWNSSRVCECRPGMFCSTSAVNSCARCFFHSVCPAGMIVKFPGTAQKNTVCEPASPGVSPACASPENCKEPSSGTIPQAKPTPVSPATSSASTMPVRGGTRLAQEAASKLTRAPDSPSSVGRPSSDPGLSPTQPCPEGSGDCRKQCEPDYYLDEAGRCTACVSCSRDDLVEKTPCAWNSSRTCECRPGMICATSATNSCARCVPYPICAAETVTKPQDMAEKDTTFEAPPLGTQPDCNPTPENGEAPASTSPTQSLLVDSQASKTLPIPTSAPVALSSTGKPVLDAGPVLFWVILVLVVVVGSSAFLLCHRRACRKRIRQKLHLCYPVQTSQPKLELVDSRPRRSSTQLRSGASVTEPVAEERGLMSQPLMETCHSVGAAYLESLPLQDASPAGGPSSPRDLPEPRVSTEHTNNKIEKIYIMKADTVIVGTVKAELPEGRGLAGPAEPELEEELEADHTPHYPEQETEPPLGSCSDVMLSVEEEGKEDPLPTAASGK

SEQ ID NO: 36 - protein, 515 aa, Homo sapiens [sequence omitted]

SEQ ID NO: 37 - protein, 332 aa, Homo sapiens
MLWLFQSLLFVFCFGPGNVVSQSSLTPLMVNGILGESVTLPLEFPAGEKVNFITWLFNETSLAFIVPHETKSPEIHVTNPKQGKRLNFTQSYSLQLSNLKMEDTGSYRAQISTKTSAKLSSYTLRILRQLRNIQVTNHSQLFQNMTCELHLTCSVEDADDNVSFRWEALGNTLSSQPNLTVSWDPRISSEQDYTCIAENAVSNLSFSVSAQKLCEDVKIQYTDTKMILFMVSGICIVFGFIILLLLVLRKRRDSLSLSTQRTQGPAESARNLEYVSVSPTNNTVYASVTHSNRETEIWTPRENDTITIYSTINHSKESKPTFSRATALDNVV

SEQ ID NO: 38 - protein, 386 aa, Homo sapiens
MGLWGQSVPTASSARAGRYPGARTASGTRPWLLDPKILKFVVFIVAVLLPVRVDSATIPRQDEVPQQTVAPQQQRRSLKEEECPAGSHRSEYTGACNPCTEGVDYTIASNNLPSCLLCTVCKSGQTNKSSCTTTRDTVCQCEKGSFQDKNSPEMCRTCRTGCPRGMVKVSNCTPRSDIKCKNESAASSTGKTPAAEETVTTILGMLASPYHYLIIIVVLVIILAVVVVGFSCRKKFISYLKGICSGGGGGPERVHRVLFRRRSCPSRVPGAEDNARNETLSNRYLQPTQVSEQEIQGQELAELTGVTVESPEEPQRLLEQAEAEGCQRRRLLVPVNDADSADISTLLDASATLEEGHAKETIQDQLVGSEKLFYEEDEAGSATSCL

SEQ ID NO: 39 - protein, 412 aa, Homo sapiens
MPLQLLLLLILLGPGNSLQLWDTWADEAEKALGPLLARDRRQATEYEYLDYDFLPETEPPEMLRNSTDTTPLTGPGTPESTTVEPAARRSTGLDAGGAVTELTTELANMGNLSTDSAAMEIQTTQPAATEAQTTQPVPTEAQTTPLAATEAQTTRLTATEAQTTPLAATEAQTTPPAATEAQTTQPTGLEAQTTAPAAMEAQTTAPAAMEAQTTPPAAMEAQTTQTTAMEAQTTAPEATEAQTTQPTATEAQTTPLAAMEALSTEPSATEALSMEPTTKRGLFIPFSVSSVTHKGIPMAASNLSVNYPVGAPDHISVKQCLLAILILALVATIFFVCTVVLAVRLSRKGHMYPVRNYSPTEMVCISSLLPDGGEGPSATANGGLSKAKSPGLTPEPREDREGDDLTLHSFLP

SEQ ID NO: 40 - protein, 585 aa, Homo sapiens
MEKKWKYCAVYYIIQIHFVKGVWEKTVNTEENVYATLGSDVNLTCQTQTVGFFVQMQWSKVTNKIDLIAVYHPQYGFYCAYGRPCESLVTFTETPENGSKWTLHLRNMSCSVSGRYECMLVLYPEGIQTKIYNLLIQTHVTADEWNSNHTIEIEINQTLEIPCFQNSSSKISSEFTYAWSVENSSTDSWVLLSKGIKEDNGTQETLISQNHLISNSTLLKDRVKLGTDYRLHLSPVQIFDDGRKFSCHIRVGPNKILRSSTTVKVFAKPEIPVIVENNSTDVLVERRFTCLLKNVFPKANITWFIDGSFLHDEKEGIYITNEERKGKDGFLELKSVLTRVHSNKPAQSDNLTIWCMALSPVPGNKVWNISSEKITFLLGSEISSTDPPLSVTESTLDTQPSPASSVSPARYPATSSVTLVDVSALRPNTTPQPSNSSMTTRGFNYPWTSSGTDTKKSVSRIPSETYSSSPSGAGSTLHDNVFTSTARAFSEVPTTANGSTKTNHVHITGIVVNKPKDGMSWPVIVAALLFCCMILFGLGVRKWCQYQKEIMERPPPFKPPPPPIKYTCIQEPNESDLPYHEMETL

SEQ ID NO: 41 - protein, 208 aa, Homo sapiens
MGLGARGAWAALLLGTLQVLALLGAAHESAAMAASANIENSGLPHNSSANSTETLQHVPSDHTNETSNSTVKPPTSVASDSSNTTVTTMKPTAASNTTTPGMVSTNMTSTTLKSTPKTTSVSQNTSQISTSTMTVTHNSSVTSAASSVTITTTMHSEAKKGSKFDTGSFVGGIVLTLGVLSILYIGCKMYYSRRGIRYRTIDEHDAII

SEQ ID NO: 42 - protein, 1032 aa, Homo sapiens [sequence omitted]

SEQ ID NO: 43 - protein, 360 aa, Homo sapiens
MDPEETSVYLDYYYATSPNSDIRETHSHVPYTSVFLPVFYTAVFLTGVLGNLVLMGALHFKPGSRRLIDIFIINLAASDFIFLVTLPLWVDKEASLGLWRTGSFLCKGSSYMISVNMHCSVLLLTCMSVDRYLAIVWPVVSRKFRRTDCAYVVCASIWFISCLLGLPTLLSRELTLIDDKPYCAEKKATPIKLIWSLVALIFTFFVPLLSIVTCYCCIARKLCAHYQQSGKHNKKLKKSIKIIFIVVAAFLVSWLPFNTFKFLAIVSGLRQEHYLPSAILQLGMEVSGPLAFANSCVNPFIYYIFDSYIRRAIVHCLCPCLKNYDFGSSTETSDSHLTKALSTFIHAEDFARRRKRSVSL

SEQ ID NO: 44 - protein, 1531 aa, Homo sapiens
MALRGFCSADGSDPLWDWNVTWNTSNPDFTKCFQNTVLVWVPCFYLWACFPFYFLYLSRHDRGYIQMTPLNKTKTALGFLLWIVCWADLFYSFWERSRGIFLAPVFLVSPTLLGITMLLATFLIQLERRKGVQSSGIMLTFWLVALVCALAILRSKIMTALKEDAQVDLFRDITFYVYFSLLLIQLVLSCFSDRSPLFSETIHDPNPCPESSASFLSRITFWWITGLIVRGYRQPLEGSDLWSLNKEDTSEQVVPVLVKNWKKECAKTRKQPVKVVYSSKDPAQPKESSKVDANEEVEALIVKSPQKEWNPSLFKVLYKTFGPYFLMSFFFKAIHDLMMFSGPQILKLLIKFVNDTKAPDWQGYFYTVLLFVTACLQTLVLHQYFHICFVSGMRIKTAVIGAVYRKALVITNSARKSSTVGEIVNLMSVDAQRFMDLATYINMIWSAPLQVILALYLLWLNLGPSVLAGVAVMVLMVPVNAVMAMKTKTYQVAHMKSKDNRIKLMNEILNGIKVLKLYAWELAFKDKVLAIRQEELKVLKKSAYLSAVGTFTWVCTPFLVALCTFAVYVTIDENNILDAQTAFVSLALFNILRFPLNILPMVISSIVQASVSLKRLRIFLSHEELEPDSIERRPVKDGGGTNSITVRNATFTWARSDPPTLNGITFSIPEGALVAVVGQVGCGKSSLLSALLAEMDKVEGHVAIKGSVAYVPQQAWIQNDSLRENILFGCQLEEPYYRSVIQACALLPDLEILPSGDRTEIGEKGVNLSGGQKQRVSLARAVYSNADIYLFDDPLSAVDAHVGKHIFENVIGPKGMLKNKTRILVTHSMSYLPQVDVIIVMSGGKISEMGSYQELLARDGAFAEFLRTYASTEQEQDAEENGVTGVSGPGKEAKQMENGMLVTDSAGKQLQRQLSSSSSYSGDISRHHNSTAELQKAEAKKEETWKLMEADKAQTGQVKLSVYWDYMKAIGLFISFLSIFLFMCNHVSALASNYWLSLWTDDPIVNGTQEHTKVRLSVYGALGISQGIAVFGYSMAVSIGGILASRCLHVDLLHSILRSPMSFFERTPSGNLVNRFSKELDTVDSMIPEVIKMFMGSLFNVIGACIVILLATPIAAIIIPPLGLIYFFVQRFYVASSRQLKRLESVSRSPVYSHFNETLLGVSVIRAFEEQERFIHQSDLKVDENQKAYYPSIVANRWLAVRLECVGNCIVLFAALFAVISRHSLSAGLVGLSVSYSLQVTTYLNWLVRMSSEMETNIVAVERLKEYSETEKEAPWQIQETAPPSSWPQVGRVEFRNYCLRYREDLDFVLRHINVTINGGEKVGIVGRTGAGKSSLTLGLFRINESAEGEIIIDGINIAKIGLHDLRFKITIIPQDPVLFSGSLRMNLDPFSQYSDEEVWTSLELAHLKDFVSALPDKLDHECAEGGENLSVGQRQLVCLARALLRKTKILVLDEATAAVDLETDDLIQSTIRTQFEDCTVLTIAHRLNTIMDYTRVIVLDKGEIQEYGAPSDLLQQRGLFYSMAKDAGLV

SEQ ID NO: 45 - protein, 355 aa, Homo sapiens
MDQFPESVTENFEYDDLAEACYIGDIVVFGTVFLSIFYSVIFAIGLVGNLLVVFALTNSKKPKSVTDIYLLNLALSDLLFVATLPFWTHYLINEKGLHNAMCKFTTAFFFIGFFGSIFFITVISIDRYLAIVLAANSMNNRTVQHGVTISLGVWAAAILVAAPQFMFTKQKENECLGDYPEVLQEIWPVLRNVETNFLGFLLPLLIMSYCYFRIIQTLFSCKNHKKAKAIKLILLVVIVFFLFWTPYNVMIFLETLKLYDFFPSCDMRKDLRLALSVTETVAFSHCCLNPLIYAFAGEKFRRYLYHLYGKCLAVLCGRSVHVDFSSSESQRSRHGSVLSSNFTYHTSDGDALLLL

SEQ ID NO: 46 - protein, 297 aa, Homo sapiens
MTTPRNSVNGTFPAEPMKGPIAMQSGPKPLFRRMSSLVGPTQSFFMRESKTLGAVQIMNGLFHIALGGLLMIPAGIYAPICVTVWYPLWGGIMYIISGSLLAATEKNSRKCLVKGKMIMNSLSLFAAISGMILSIMDILNIKISHFLKMESLNFIRAHTPYINIYNCEPANPSEKNSPSTQYCYSIQSLFLGILSVMLIFAFFQELVIAGIVENEWKRTCSRPKSNIVLLSAEEKKEQTIEIKEEVVGLTETSSQPKNEEDIEIIPIQEEEEEETETNFPEPPQDQESSPIENDSSP

SEQ ID NO: 47 - protein, 263 aa, Homo sapiens
MITFLPLLLGLSLGCTGAGGFVAHVESTCLLDDAGTPKDFTYCISFNKDLLTCWDPEENKMAPCEFGVLNSLANVLSQHLNQKDTLMQRLRNGLQNCATHTQPFWGSLTNRTRPPSVQVAKTTPFNTREPVMLACYVWGFYPAEVTITWRKNGKLVMPHSSAHKTAQPNGDWTYQTLSHLALTPSYGDTYTCVVEHIGAPEPILRDWTPGLSPMQTLKVSVSAVTLGLGLIIFSLGVISWRRAGHSSYTPLPGSNYSEGWHIS

SEQ ID NO: 48 - protein, 310 aa, Homo sapiens
MGILSFLPVLATESDWADCKSPQPWGHMLLWTAVLFLAPVAGTPAAPPKAVLKLEPQWINVLQEDSVTLTCRGTHSPESDSIQWFHNGNLIPTHTQPSYRFKANNNDSGEYTCQTGQTSLSDPVHLTVLSEWLVLQTPHLEFQEGETIVLRCHSWKDKPLVKVTFFQNGKSKKFSRSDPNFSIPQANHSHSGDYHCTGNIGYTLYSSKPVTITVQAPSSSPMGIIVAVVTGIAVAAIVAAVVALIYCRKKRISALPGYPECREMGETLPEKPANPTNPDEADKVGAENTITYSLLMHPDALEEPDDQNRI

SEQ ID NO: 49 - protein, 346 aa, Homo sapiens
MAPRSLLLLLSGALALTDTWAGSHSLRYFSTAVSRPGRGEPRYIAVEYVDDTQFLRFDSDAAIPRMEPREPWVEQEGPQYWEWTTGYAKANAQTDRVALRNLLRRYNQSEAGSHTLQGMNGCDMGPDGRLLRGYHQHAYDGKDYISLNEDLRSWTAADTVAQITQRFYEAEEYAEEFRTYLEGECLELLRRYLENGKETLQRADPPKAHVAHHPISDHEATLRCWALGFYPAEITLTWQRDGEEQTQDTELVETRPAGDGTFQKWAAVVVPPGEEQRYTCHVQHEGLPQPLILRWEQSPQPTIPIVGIVAGLVVLGAVVTGAVVAAVMWRKKSSDRNRGSYSQAAV

SEQ ID NO: 50 - protein, 819 aa, Homo sapiens
MGSGARFPSGTLRVRWLLLLGLVGPVLGAARPGFQQTSHLSSYEIITPWRLTRERREAPRPYSKQVSYVIQAEGKEHIIHLERNKDLLPEDFVVYTYNKEGTLITDHPNIQNHCHYRGYVEGVHNSSIALSDCFGLRGLLHLENASYGIEPLQNSSHFEHIIYRMDDVYKEPLKCGVSNKDIEKETAKDEEEEPPSMTQLLRRRRAVLPQTRYVELFIVVDKERYDMMGRNQTAVREEMILLANYLDSMYIMLNIRIVLVGLEIWTNGNLINIVGGAGDVLGNFVQWREKFLITRRRHDSAQLVLKKGFGGTAGMAFVGTVCSRSHAGGINVFGQITVETFASIVAHELGHNLGMNHDDGRDCSCGAKSCIMNSGASGSRNFSSCSAEDFEKLTLNKGGNCLLNIPKPDEAYSAPSCGNKLVDAGEECDCGTPKECELDPCCEGSTCKLKSFAECAYGDCCKDCRFLPGGTLCRGKTSECDVPEYCNGSSQFCQPDVFIQNGYPCQNNKAYCYNGMCQYYDAQCQVIFGSKAKAAPKDCFIEVNSKGDRFGNCGFSGNEYKKCATGNALCGKLQCENVQEIPVFGIVPAIIQTPSRGTKCWGVDFQLGSDVPDPGMVNEGTKCGAGKICRNFQCVDASVLNYDCDVQKKCHGHGVCNSNKNCHCENGWAPPNCETKGYGGSVDSGPTYNEMNTALRDGLLVFFFLIVPLIVCAIFIFIKRDQLWRSYFRKKRSQTYESDGKNQANPSRQPGSVPRHVSPVTPPREVPIYANRFAVPTYAAKQPQQFPSRPPPPQPKVSSQGNLIPARPAPAPPLYSSLT

SEQ ID NO: 51 - protein, 365 aa, Homo sapiens
MGVPRPQPWALGLLLFLLPGSLGAESHLSLLYHLTAVSSPAPGTPAFWVSGWLGPQQYLSYNSLRGEAEPCGAWVWENQVSWYWEKETTDLRIKEKLFLEAFKALGGKGPYTLQGLLGCELGPDNTSVPTAKFALNGEEFMNFDLKQGTWGGDWPEALAISQRWQQQDKAANKELTFLLFSCPHRLREHLERGRGNLEWKEPPSMRLKARPSSPGFSVLTCSAFSFYPPELQLRFLRNGLAAGTGQGDFGPNSDGSFHASSSLTVKSGDEHHYCCIVQHAGLAQPLRVELESPAKSSVLVVGIVIGVLLLTAAAVGGALLWRRMRSGLPAPWISLRGDDTGVLLPTPGEAQDADLKDVNVIPATA

SEQ ID NO: 52 - protein, 918 aa, Homo sapiens
MLTLQTWLVQALFIFLTTESTGELLDPCGYISPESPVVQLHSNFTAVCVLKEKCMDYFHVNANYIVWKTNHFTIPKEQYTIINRTASSVTFTDIASLNIQLTCNILTFGQLEQNVYGITIISGLPPEKPKNLSCIVNEGKKMRCEWDGGRETHLETNFTLKSEWATHKFADCKAKRDTPTSCTVDYSTVYFVNIEVWVEAENALGKVTSDHINFDPVYKVKPNPPHNLSVINSEELSSILKLTWTNPSIKSVIILKYNIQYRTKDASTWSQIPPEDTASTRSSFTVQDLKPFTEYVFRIRCMKEDGKGYWSDWSEEASGITYEDRPSKAPSFWYKIDPSHTQGYRTVQLVWKTLPPFEANGKILDYEVTLTRWKSHLQNYTVNATKLTVNLTNDRYLATLTVRNLVGKSDAAVLTIPACDFQATHPVMDLKAFPKDNMLWVEWTTPRESVKKYILEWCVLSDKAPCITDWQQEDGTVHRTYLRGNLAESKCYLITVTPVYADGPGSPESIKAYLKQAPPSKGPTVRTKKVGKNEAVLEWDQLPVDVQNGFIRNYTIFYRTIIGNETAVNVDSSHTEYTLSSLTSDTLYMVRMAAYTDEGGKDGPEFTFTTPKFAQGEIEAIVVPVCLAFLLTTLLGVLFCFNKRDLIKKHIWPNVPDPSKSHIAQWSPHTPPRHNFNSKDQMYSDGNFTDVSVVEIEANDKKPFPEDLKSLDLFKKEKINTEGHSSGIGGSSCMSSSRPSISSSDENESSQNTSSTVQYSTVVHSGYRHQVPSVQVFSRSESTQPLLDSEERPEDLQLVDHVDGGDGILPRQQYFKQNCSQHESSPDISHFERSKQVSSVNEEDFVRLKQQISDHISQSCGSGQMKMFQEVSAADAFGPGTEGQVERFETVGMEAATDEGMPKSYLPQTVRQGGYMPQ

SEQ ID NO: 53 - protein, 250 aa, Homo sapiens
MVAGSDAGRALGVLSVVCLLHCFGFISCFSQQIYGVVYGNVTFHVPSNVPLKEVLWKKQKDKVAELENSEFRAFSSFKNRVYLDTVSGSLTIYNLTSSDEDEYEMESPNITDTMKFFLYVLESLPSPTLTCALTNGSIEVQCMIPEHYNSHRGLIMYSWDCPMEQCKRNSTSIYFKMENDLPQKIQCTLSNPLFNTTSSIILTTCIPSSGHSRHRYALIPIPLAVITTCIVLYMNGILKCDRKPDRTNSN

SEQ ID NO: 54 - protein, 362 aa, Homo sapiens
MGTEATEQVSWGHYSGDEEDAYSAEPLPELCYKADVQAFSRAFQPSVSLTVAALGLAGNGLVLATHLAARRAARSPTSAHLLQLALADLLLALTLPFAAAGALQGWSLGSATCRTISGLYSASFHAGFLFLACISADRYVAIARALPAGPRPSTPGRAHLVSVIVWLLSLLLALPALLFSQDGQREGQRRCRLIFPEGLTQTVKGASAVAQVALGFALPLGVMVACYALLGRTLLAARGPERRRALRVVVALVAAFVVLQLPYSLALLLDTADLLAARERSCPASKRKDVALLVTSGLALARCGLNPVLYAFLGLRFRQDLRRLLRGGSCPSGPQPRRGCPRRPRLSSCSAPTETHSLSWDN

SEQ ID NO: 55 - protein, 247 aa, Homo sapiens
MEYHPDLENLDEDGYTQLHFDSQSNTRIAVVSEKGSCAASPPWRLIAVILGILCLVILVIAVVLGTMAIWRSNSGSNTLENGYFLSRNKENHSQPTQSSLEDSVTPTKAVKTTGVLSSPCPPNWIIYEKSCYLFSMSLNSWDGSKRQCWQLGSNLLKIDSSNELGFIVKQVSSQPDNSFWIGLSRPQTEVPWLWEDGSTFSSNLFQIRTTATQENPSPNCVWIHVSVIYDQLCSVPSYSICEKKFSM

SEQ ID NO: 56 - protein, 282 aa, Homo sapiens
MSGGWMAQVGAWRTGALGLALLLLLGLGLGLEAAASPLSTPTSAQAAGPSSGSCPPTKFQCRTSGLCVPLTWRCDRDLDCSDGSDEEECRIEPCTQKGQCPPPPGLPCPCTGVSDCSGGTDKKLRNCSRLACLAGELRCTLSDDCIPLTWRCDGHPDCPDSSDELGCGTNEILPEGDATTMGPPVTLESVTSLRNATTMGPPVTLESVPSVGNATSSSAGDQSGSPTAYGVIAAAAVLSASLVTATLLLLSWLRAQERLRPLGLLVAMKESLLLSEQKTSLP

SEQ ID NO: 57 - protein, 734 aa, Homo sapiens
MLLWLLLLILTPGREQSGVAPKAVLLLNPPWSTAFKGEKVALICSSISHSLAQGDTYWYHDEKLLKIKHDKIQITEPGNYQCKTRGSSLSDAVHVEFSPDWLILQALHPVFEGDNVILRCQGKDNKNTHQKVYYKDGKQLPNSYNLEKITVNSVSRDNSKYHCTAYRKFYILDIEVTSKPLNIQVQELFLHPVLRASSSTPIEGSPMTLTCETQLSPQRPDVQLQFSLFRDSQTLGLGWSRSPRLQIPAMWTEDSGSYWCEVETVTHSIKKRSLRSQIRVQRVPVSNVNLEIRPTGGQLIEGENMVLICSVAQGSGTVTFSWHKEGRVRSLGRKTQRSLLAELHVLTVKESDAGRYYCAADNVHSPILSTWIRVTVRIPVSHPVLTFRAPRAHTVVGDLLELHCESLRGSPPILYRFYHEDVTLGNSSAPSGGGASFNLSLTAEHSGNYSCDADNGLGAQHSHGVSLRVTVPVSRPVLTLRAPGAQAVVGDLLELHCESLRGSFPILYWFYHEDDTLGNISAHSGGGASFNLSLTTEHSGNYSCEADNGLGAQHSKVVTLNVTGTSRNRTGLTAAGITGLVLSILVLAAAAALLHYARARRKPGGLSATGTSSHSPSECQEPSSSRPSRIDPQEPTHSKPLAPMELEPMYSNVNPGDSNPIYSQIWSIQHTKENSANCPMMHQEHEELTVLYSELKKTHPDDSAGEASSRGRAHEEDDEENYENVPRVLLASDH

SEQ ID NO: 58 - protein, 1568 aa, Homo sapiens
MEVSRRKAPPRPPRPAAPLPLLAYLLALAAPGRGADEPVWRSEQAIGAIAASQEDGVFVASGSCLDQLDYSLEHSLSRLYRDQAGNCTEPVSLAPPARPRPGSSFSKLLLPYREGAAGLGGLLLTGWTFDRGACEVRPLGNLSRNSLRNGTEVVSCHPQGSTAGVVYRAGRNNRWYLAVAATYVLPEPETASRCNPAASDHDTAIALKDTEGRSLATQELGRLKLCEGAGSLHFVDAFLWNGSIYFPYYPYNYTSGAATGWPSMARIAQSTEVLFQGQASLDCGHGHPDGRRLLLSSSLVEALDVWAGVFSAAAGEGQERRSPTTTALCLFRMSEIQARAKRVSWDFKTAESHCKEGDQPERVQPIASSTLIHSDLTSVYGTVVMNRTVLFLGTGDGQLLKVILGENLTSNCPEVIYEIKEETPVFYKLVPDPVKNIYIYLTAGKEVRRIRVANCNKHKSCSECLTATDPHCGWCHSLQRCTFQGDCVHSENLENWLDISSGAKKCPKIQIIRSSKEKTTVTMVGSFSPRHSKCMVKNVDSSRELCQNKSQPNRTCTCSIPTRATYKDVSVVNVMFSFGSWNLSDRFNFTNCSSLKECPACVETGCAWCKSARRCIHPFTACDPSDYERNQEQCPVAVEKTSGGGRPKENKGNRTNQALQVFYIKSIEPQKVSTLGKSNVIVTGANFTRASNITMILKGTSTCDKDVIQVSHVLNDTHMKFSLPSSRKEMKDVCIQFDGGNCSSVGSLSYIALPHCSLIFPATTWISGGQNITMMGRNFDVIDNLIISHELKGNINVSEYCVATYCGFLAPSLKSSKVRTNVTVKLRVQDTYLDCGTLQYREDPRFTGYRVESEVDTELEVKIQKENDNFNISKKDIEITLFHGENGQLNCSFENITRNQDLTTILCKIKGIKTASTIANSSKKVRVKLGNLELYVEQESVPSTWYFLIVLPVLLVIVIFAAVGVTRHKSKELSRKQSQQLELLESELRKEIRDGFAELQMDKLDVVDSFGTVPFLDYKHFALRTFFPESGGFTHIFTEDMHNRDANDKNESLTALDALICNKSFLVTVIHTLEKQKNFSVKDRCLFASFLTIALQTKLVYLTSILEVLTRDLMEQCSNMQPKLMLRRTESVVEKLLTNWMSVCLSGFLRETVGEPFYLLVTTLNQKINKGPVDVITCKALYTLNEDWLLWQVPEFSTVALNVVFEKIPENESADVCRNISVNVLDCDTIGQAKEKIFQAFLSKNGSPYGLQLNEIGLELQMGTRQKELLDIDSSSVILEDGITKLNTIGHYEISNGSTIKVFKKIANFTSDVEYSDDHCHLILPDSEAFQDVQGKRHRGKHKFKVKEMYLTKLLSTKVAIHSVLEKLFRSIWSLPNSRAPFAIKYFFDFLDAQAENKKITDPDVVHIWKTNSLPLRFWVNILKNPQFVFDIKKTPHIDGCLSVIAQAFMDAFSLTEQQLGKEAPTNKLLYAKDIPTYKEEVKSYYKAIRDLPPLSSSEMEEFLTQESKKHENEFNEEVALTEIYKYIVKYFDEILNKLERERGLEEAQKQLLHVKVLFDEKKKCKWM

SEQ ID NO: 59 - protein, 866 aa, Homo sapiens
MGAARSPPSAVPGPLLGLLLLLLGVLAPGGASLRLLDHRALVCSQPGLNCTVKNSTCLDDSWIHPRNLTPSSPKDLQIQLHFAHTQQGDLFPVAHIEWTLQTDASILYLEGAELSVLQLNTNERLCVRFEFLSKLRHHHRRWRFTFSHFVVDPDQEYEVTVHHLPKPIPDGDPNHQSKNFLVPDCEHARMKVTTPCMSSGSLWDPNITVETLEAHQLRVSFTLWNESTHYQILLTSFPHMENHSCFEHMHHIPAPRPEEFHQRSNVTLTLRNLKGCCRHQVQIQPFFSSCLNDCLRHSATVSCPEMPDTPEPIPDYMPLWVYWFITGISILLVGSVILLIVCMTWRLAGPGSEKYSDDTKYTDGLPAADLIPPPLKPRKVWIIYSADHPLYVDVVLKFAQFLLTACGTEVALDLLEEQAISEAGVMTWVGRQKQEMVESNSKIIVLCSRGTRAKWQALLGRGAPVRLRCDHGKPVGDLFTAAMNMILPDFKRPACFGTYVVCYFSEVSCDGDVPDLFGAAPRYPLMDRFEEVYFRIQDLEMFQPGRMHRVGELSGDNYLRSPGGRQLRAALDRFRDWQVRCPDWFECENLYSADDQDAPSLDEEVFEEPLLPPGTGIVKRAPLVREPGSQACLAIDPLVGEEGGAAVAKLEPHLQPRGQPAPQPLHTLVLAAEEGALVAAVEPGPLADGAAVRLALAGEGEACPLLGSPGAGRNSVLFLPVDPEDSPLGSSTPMASPDLLPEDVREHLEGLMLSLFEQSLSCQAQGGCSRPAMVLTDPHTPYEEEQRQSVQSDQGYISRSSPQPPEGLTEMEEEEEEEQDPGKPALPLSPEDLESLRSLQRQLLFRQLQKNSGWDTMGSESEGPSA

SEQ ID NO: 60 - protein, 355 aa, Homo sapiens
METPNTTEDYDTTTEFDYGDATPCQKVNERAFGAQLLPPLYSLVFVIGLVGNILVVLVLVQYKRLKNMTSIYLLNLAISDLLFLFTLPFWIDYKLKDDWVFGDAMCKILSGFYYTGLYSEIFFIILLTIDRYLAIVHAVFALRARTVTFGVITSIIIWALAILASMPGLYFSKTQWEFTHHTCSLHFPHESLREWKLFQALKLNLFGLVLPLLVMIICYTGIIKILLRRPNEKKSKAVRLIFVIMIIFFLFWTPYNLTILISVFQDFLFTHECEQSRHLDLAVQVTEVIAYTHCCVNPVIYAFVGERFRKYLRQLFHRRVAVHLVKWLPFLSVDRLERVSSTSPSTGEHELSAGF

SEQ ID NO: 61 - protein, 288 aa, Homo sapiens
MGHTRRQGTSPSKCPYLNFFQLLVLAGLSHFCSGVIHVTKEVKEVATLSCGHNVSVEELAQTRIYWQKEKKMVLTMMSGDMNIWPEYKNRTIFDITNNLSIVILALRPSDEGTYECVVLKYEKDAFKREHLAEVTLSVKADFPTPSISDFEIPTSNIRRIICSTSGGFPEPHLSWLENGEELNAINTTVSQDPETELYAVSSKLDFNMTTNHSFMCLIKYGHLRVNQTFNWNTTKQEHFPDNLLPSWAITLISVNGIFVICCLTYCFAPRCRERRRNERLRRESVRPV

SEQ ID NO: 62 - protein, 385 aa, Homo sapiens
MWGRLLLWPLVLGFSLSGGTQTPSVYDESGSTGGGDDSTPSILPAPRGYPGQVCANDSDTLELPDSSRALLLGWVPTRLVPALYGLVLVVGLPANGLALWVLATQAPRLPSTMLLMNLAAADLLLALALPPRIAYHLRGQRWPFGEAACRLATAALYGHMYGSVLLLAAVSLDRYLALVHPLRARALRGRRLALGLCMAAWLMAAALALPLTLQRQTFRLARSDRVLCHDALPLDAQASHWQPAFTCLALLGCFLPLLAMLLCYGATLHTLAASGRRYGHALRLTAVVLASAVAFFVPSNLLLLLHYSDPSPSAWGNLYGAYVPSLALSTLNSCVDPFIYYYVSAEFRDKVRAGLFQRSPGDTVASKASAEGGSRGMGTHSSLLQ

SEQ ID NO: 63 - protein, 468 aa, Homo sapiens
MLAVGCALLAALLAAPGAALAPRRCPAQEVARGVLTSLPGDSVTLTCPGVEPEDNATVHWVLRKPAAGSHPSRWAGMGRRLLLRSVQLHDSGNYSCYRAGRPAGTVHLLVDVPPEEPQLSCFRKSPLSNVVCEWGPRSTPSLTTKAVLLVRKFQNSPAEDFQEPCQYSQESQKFSCQLAVPEGDSSFYIVSMCVASSVGSKFSKTQTFQGCGILQPDPPANITVTAVARNPRWLSVTWQDPHSWNSSFYRLRFELRYRAERSKTFTTWMVKDLQHHCVIHDAWSGLRHVVQLRAQEEFGQGEWSEWSPEAMGTPWTESRSPPAENEVSTPMQALTTNKDDDNILFRDSANATSLPVQDSSSVPLPTFLVAGGSLAFGTLLCIAIVLRFKKTWKLRALKEGKTSMHPPYSLGQLVPERPRPTPVLVPLISPPVSPSSLGSDNTSSHNRPDARDPRSPYDISNTDYFFPR

SEQ ID NO: 64 - protein, 301 aa, Homo sapiens
MFSHLPFDCVLLLLLLLLTRSSEVEYRAEVGQNAYLPCFYTPAAPGNLVPVCWGKGACPVFECGNVVLRTDERDVNYWTSRYWLNGDFRKGDVSLTIENVTLADSGIYCCRIQIPGIMNDEKFNLKLVIKPAKVTPAPTRQRDFTAAFPRMLTTRGHGPAETQTLGSLPDINLTQISTLANELRDSRLANDLRDSGATIRIGIYIGAGICAGLALALIFGALIFKWYSHSKEKIQNLSLISLANLPPSGLANAVAEGIRSEENIYTIEENVYEVEEPNEYYCYVSSRQQPSQPLGCRFAMP

SEQ ID NO: 65 - protein, 636 aa, Homo sapiens
MRGGRGAPFWLWPLPKLALLPLLWVLFQRTRPQGSAGPLQCYGVGPLGDLNCSWEPLGDLGAPSELHLQSQKYRSNKTQTVAVAAGRSWVAIPREQLTMSDKLLVWGTKAGQPLWPPVFVNLETQMKPNAPRLGPDVDFSEDDPLEATVHWAPPTWPSHKVLICQFHYRRCQEAAWTLLEPELKTIPLTPVEIQDLELATGYKVYGRCRMEKEEDLWGEWSPILSFQTPPSAPKDVWVSGNLCGTPGGEEPLLLWKAPGPCVQVSYKVWFWVGGRELSPEGITCCCSLIPSGAEWARVSAVNATSWEPLTNLSLVCLDSASAPRSVAVSSIAGSTELLVTWQPGPGEPLEHVVDWARDGDPLEKLNWVRLPPGNLSALLPGNFTVGVPYRITVTAVSASGLASASSVWGFREELAPLVGPTLWRLQDAPPGTPAIAWGEVPRHQLRGHLTHYTLCAQSGTSPSVCMNVSGNTQSVTLPDLPWGPCELWVTASTIAGQGPPGPILRLHLPDNTLRWKVLPGILFLWGLFLLGCGLSLATSGRCYHLRHKVLPRWVWEKVPDPANSSSGQPHMEQVPEAQPLGDLPILEVEEMEPPPVMESSQPAQATAPLDSGYEKHFLPTPEELGLLGPPRPQVLA

SEQ ID NO: 66 - protein, 380 aa, Homo sapiens
MAFVCLAIGCLYTFLISTTFGCTSSSDTEIKVNPPQDFEIVDPGYLGYLYLQWQPPLSLDHFKECTVEYELKYRNIGSETWKTIITKNLHYKDGFDLNKGIEAKIHTLLPWQCTNGSEVQSSWAETTYWISPQGIPETKVQDMDCVYYNWQYLLCSWKPGIGVLLDTNYNLFYWYEGLDHALQCVDYIKADGQNIGCRFPYLEASDYKDFYICVNGSSENKPIRSSYFTFQLQNIVKPLPPVYLTFTRESSCEIKLKWSIPLGPIPARCFDYEIEIREDDTTLVTATVENETYTLKTTNETRQLCFVVRSKVNIYCSDDGIWSEWSDKQCWEGEDLSKKTLLRFWLPFGFILILVIFVTGLLLRKPNTYPKMIPEFFCDT

SEQ ID NO: 67 - protein, 798 aa, Homo sapiens
MVALPMVLVLLLVLSRGESELDAKIPSTGDATEWRNPHLSMLGSCQPAPSCQKCILSHPSCAWCKQLNFTASGEAEARRCARREELLARGCPLEELEEPRGQQEVLQDQPLSQGARGEGATQLAPQRVRVTLRPGEPQQLQVRFLRAEGYPVDLYYLMDLSYSMKDDLERVRQLGHALLVRLQEVTHSVRIGFGSFVDKTVLPFVSTVPSKLRHPCPTRLERCQSPFSFHHVLSLTGDAQAFEREVGRQSVSGNLDSPEGGFDAILQAALCQEQIGWRNVSRLLVFTSDDTFHTAGDGKLGGIFMPSDGHCHLDSNGLYSRSTEFDYPSVGQVAQALSAANIQPIFAVTSAALPVYQELSKLIPKSAVGELSEDSSNVVQLIMDAYNSLSSTVTLEHSSLPPGVHISYESQCEGPEKREGKAEDRGQCNHVRINQTVTFWVSLQATHCLPEPHLLRLRALGFSEELIVELHTLCDCNCSDTQPQAPHCSDGQGHLQCGVCSCAPGRLGRLCECSVAELSSPDLESGCRAPNGTGPLCSGKGHCQCGRCSCSGQSSGHLCECDDASCERHEGILCGGFGRCQCGVCHCHANRTGRACECSGDMDSCISPEGGLCSGHGRCKCNRCQCLDGYYGALCDQCPGCKTPCERHRDCAECGAFRTGPLATNCSTACAHTNVTLALAPILDDGWCKERTLDNQLFFFLVEDDARGTVVLRVRPQEKGADHTQAIVLGCVGGIVAVGLGLVLAYRLSVEIYDRREYSRFEKEQQQLNWKQDSNPLYKSAITTTINPRFQEADSPTL

SEQ ID NO: 68 - protein, 508 aa, Homo sapiens
MLLWSLLVIFDAVTEQADSLTLVAPSSVFEGDSIVLKCQGEQNWKIQKMAYHKDNKELSVFKKFSDFLIQSAVLSDSGNYFCSTKGQLFLWDKTSNIVKIKVQELFQRPVLTASSFQPIEGGPVSLKCETRLSPQRLDVQLQFCFFRENQVLGSGWSSSPELQISAVWSEDTGSYWCKAETVTHRIRKQSLQSQIHVQRIPISNVSLEIRAPGGQVTEGQKLILLCSVAGGTGNVTFSWYREATGTSMGKKTQRSLSAELEIPAVKESDAGKYYCRADNGHVPIQSKVVNIPVRIPVSRPVLTLRSPGAQAAVGDLLELHCEALRGSPPILYQFYHEDVTLGNSSAPSGGGASFNLSLTAEHSGNYSCEANNGLGAQCSEAVPVSISGPDGYRRDLMTAGVLWGLFGVLGFTGVALLLYALFHKISGESSATNEPRGASRPNPQEFTYSSPTPDMEELQPVYVNVGSVDVDVVYSQVWSMQQPESSANIRTLLENKDSQVIYSSVKKS

SEQ ID NO: 69 - protein, 372 aa, Homo sapiens [sequence omitted]

SEQ ID NO: 70 - protein, 275 aa, Homo sapiens
MSSFGYRTLTVALFTLICCPGSDEKVFEVHVRPKKLAVEPKGSLEVNCSTTCNQPEVGGLETSLDKILLDEQAQWKHYLVSNISHDTVLQCHFTCSGKQESMNSNVSVYQPPRQVILTLQPTLVAVGKSFTIECRVPTVEPLDSLTLFLFRGNETLHYETFGKAAPAPQEATATFNSTADREDGHRNFSCLAVLDLMSRGGNIFHKHSAPKMLEIYEPVSDSQMVIIVTVVSVLLSLFVTSVLLCFIFGQHLRQQRMGTYGVRAAWRRLPQAFRP

SEQ ID NO: 71 - protein, 267 aa, Homo sapiens
MGSACIKVTKYFLFLFNLIFFILGAVILGFGVWILADKSSFISVLQTSSSSLRMGAYVFIGVGAVTMLMGFLGCIGAVNEVRCLLGLYFAFLLLILIAQVTAGALFYFNMGKLKQEMGGIVTELIRDYNSSREDSLQDAWDYVQAQVKCCGWVSFYNWTDNAELMNRPEVTYPCSCEVKGEEDNSLSVRKGFCEAPGNRTQSGNHPEDWPVYQEGCMEKVQAWLQENLGIILGVGVGVAIIELLGMVLSICLCRHVHSEDYSKVPKY

SEQ ID NO: 72 - protein, 205 aa, Homo sapiens
MSRGLQLLLLSCAYSLAPATPEVKVACSEDVDLPCTAPWDPQVPYTVSWVKLLEGGEERMETPQEDHLRGQHYHQKGQNGSFDAPNERPYSLKIRNTTSCNSGTYRCTLQDPDGQRNLSGKVILRVTGCPAQRKEETFKKYRAEIVLLLALVIFYLTLIIFTCKFARLQSIFPDFSKAGMERAFLPVTSPNKHLGLVTPHKTELV

SEQ ID NO: 73 - protein, 505 aa, Homo sapiens
MAESAGASSFFPLVVLLLAGSGGSGPRGVQALLCACTSCLQANYTCETDGACMVSIFNLDGMEHHVRTCIPKVELVPAGKPFYCLSSEDLRNTHCCYTDYCNRIDLRVPSGHLKEPEHPSMWGPVELVGIIAGPVFLLFLIIIIVFLVINYHQRVYHNRQRLDMEDPSCEMCLSKDKTLQDLVYDLSTSGSGSGLPLFVQRTVARTIVLQEIIGKGRFGEVWRGRWRGGDVAVKIFSSREERSWFREAEIYQTVMLRHENILGFIAADNKDNGTWTQLWLVSDYHEHGSLFDYLNRYTVTIEGMIKLALSAASGLAHLHMEIVGTQGKPGIAHRDLKSKNILVKKNGMCAIADLGLAVRHDAVTDTIDIAPNQRVGTKRYMAPEVLDETINMKHFDSFKCADIYALGLVYWEIARRCNSGGVHEEYQLPYYDLVPSDPSIEEMRKVVCDQKLRPNIPNWWQSYEALRVMGKMMRECWYANGAARLTALRIKKTLSQLSVQEDVKI

SEQ ID NO: 74 - protein, 1722 aa, Homo sapiens
MRTGWATPRRPAGLLMLLFWFFDLAEPSGRAANDPFTIVHGNTGKCIKPVYGWIVADDCDETEDKLWKWVSQHRLFHLHSQKCLGLDITKSVNELRMFSCDSSAMLWWKCEHHSLYGAARYRLALKDGHGTAISNASDVWKKGGSEESLCDQPYHEIYTRDGNSYGRPCEFPFLIDGTWHHDCILDEDHSGPWCATTLNYEYDRKWGICLKPENGCEDNWEKNEQFGSCYQFNTQTALSWKEAYVSCQNQGADLLSINSAAELTYLKEKEGIAKIFWIGLNQLYSARGWEWSDHKPLNFLNWDPDRPSAPTIGGSSCARMDAESGLWQSFSCEAQLPYVCRKPLNNTVELTDVWTYSDTRCDAGWLPNNGFCYLLVNESNSWDKAHAKCKAFSSDLISIHSLADVEVVVTKLHNEDIKEEVWIGLKNINIPTLFQWSDGTEVTLTYWDENEPNVPYNKTPNCVSYLGELGQWKVQSCEEKLKYVCKRKGEKLNDASSDKMCPPDEGWKRHGETCYKIYEDEVPFGTNCNLTITSRFEQEYLNDLMKKYDKSLRKYFWTGLRDVDSCGEYNWATVGGRRRAVTFSNWNFLEPASPGGCVAMSTGKSVGKWEVKDCRSFKALSICKKMSGPLGPEEASPKPDDPCPEGWQSFPASLSCYKVFHAERIVRKRNWEEAERFCQALGAHLSSFSHVDEIKEFLHFLTDQFSGQHWLWIGLNKRSPDLQGSWQWSDRTPVSTIIMPNEFQQDYDIRDCAAVKVFHRPWRRGWHFYDDREFIYLRPFACDTKLEWVCQIPKGRTPKTPDWYNPDRAGIHGPPLIIEGSEYWFVADLHLNYEEAVLYCASNHSFLATITSFVGLKAIKNKIANISGDGQKWWIRISEWPIDDHFTYSRYPWHRFPVTFGEECLYMSAKTWLIDLGKPTDCSTKLPFICEKYNVSSLEKYSPDSAAKVQCSEQWIPFQNKCFLKIKPVSLTFSQASDTCHSYGGTLPSVLSQIEQDFITSLLPDMEATLWIGLRWTAYEKINKWTDNRELTYSNFHPLLVSGRLRIPENFFEEESRYHCALILNLQKSPFTGTWNFTSCSERHFVSLCQKYSEVKSRQTLQNASETVKYLNNLYKIIPKTLTWHSAKRECLKSNMQLVSITDPYQQAFLSVQALLHNSSLWIGLFSQDDELNFGWSDGKRLHFSRWAETNGQLEDCVVLDTDGFWKTVDCNDNQPGAICYYSGNETEKEVKPVDSVKCPSPVLNTPWIPFQNCCYNFIITKNRHMATTQDEVHTKCQKLNPKSHILSIRDEKENNFVLEQLLYFNYMASWVMLGITYRNKSLMWFDKTPLSYTHWRAGRPTIKNEKFLAGLSTDGFWDIQTFKVIEEAVYFHQHSILACKIEMVDYKEEYNTTLPQFMPYEDGIYSVIQKKVTWYEALNMCSQSGGHLASVHNQNGQLFLEDIVKRDGFPLWVGLSSHDGSESSFEWSDGSTFDYIPWKGQTSPGNCVLLDPKGTWKHEKCNSVKDGAICYKPTKSKKLSRLTYSSRCPAAKENGSRWIQYKGHCYKSDQALHSFSEAKKLCSKHDHSATIVSIKDEDENKFVSRLMRENNNITMRVWLGLSQHSVDQSWSWLDGSEVTFVKWENKSKSGVGRCSMLIASNETWKKVECEHGFGRVVCKVPLGPDYTAIAIIVATLSILVLMGGLIWFLFQRHRLHLAGFSSVRYAQGVNEDEIMLPSFHD

SEQ ID NO: 75 - protein, 298 aa, Homo sapiens
MARRSRHRLLLLLLRYLVVALGYHKAYGFSAPKDQQVVTAVEYQEAILACKTPKKTVSSRLEWKKLGRSVSFVYYQQTLQGDFKNRAEMIDFNIRIKNVTRSDAGKYRCEVSAPSEQGQNLEEDTVTLEVLVAPAVPSCEVPSSALSGTVVELRCQDKEGNPAPEYTWFKDGIRLLENPRLGSQSTNSSYTMNTKTGTLQFNTVSKLDTGEYSCEARNSVGYRRCPGKRMQVDDLNISGIIAAVVVVALVISVCGLGVCYAQRKGYFSKETSFQKSNSSSKATTMSENDFKHTKSFII

SEQ ID NO: 76 - protein, 963 aa, Homo sapiens
MGLPEPGPLRLLALLLLLLLLLLLQLQHLAAAAADPLLGGQGPAKDCEKDQFQCRNERCIPSVWRCDEDDDCLDHSDEDDCPKKTCADSDFTCDNGHCIHERWKCDGEEECPDGSDESEATCTKQVCPAEKLSCGPTSHKCVPASWRCDGEKDCEGGADEAGCATLCAPHEFQCGNRSCLAAVFVCDGDDDCGDGSDERGCADPACGPREFRCGGDGGGACIPERWVCDRQFDCEDRSDEAAELCGRPGPGATSAPAACATASQFACRSGECVHLGWRCDGDRDCKDKSDEADCPLGTCRGDEFQCGDGTCVLAIKHCNQEQDCPDGSDEAGCLQGLNECLHNNGGCSHICTDLKIGFECTCPAGFQLLDQKTCGDIDECKDPDACSQICVNYKGYFKCECYPGYEMDLLTKNCKAAAGKSPSLIFTNRHEVRRIDLVKRNYSRLIPMLKNVVALDVEVATNRIYWCDLSYRKIYSAYMDKASDPKEQEVLIDEQLHSPEGLAVDWVHKHIYWTDSGNKTISVATVDGGRRRTLFSRNLSEPRAIAVDPLRGFMYWSDWGDQAKIEKSGLNGVDRQTLVSDNIEWPNGITLDLLSQRLYWVDSKLHQLSSIDFSGGNRKTLISSTDFLSHPFGIAVFEDKVFWTDLENEAIFSANRLNGLEISILAENLNNPHDIVIFHELKQPRAPDACELSVQPNGGCEYLCLPAPQISSHSPKYTCACPDTMWLGPDMKRCYRAPQSTSTTTLASTMTRTVPATTRAPGTTVHRSTYQNHSTETPSLTAAVPSSVSVPRAPSISPSTLSPATSNHSQHYANEDSKMGSTVTAAVIGIIVPIVVIALLCMSGYLIWRNWKRKNTKSMNFDNPVYRKTTEEEDEDELHIGRTAQIGHVYPAAISSFDRPLWAEPCLGETREPEDPAPALKELFVLPGEPRSQLHQLPKNPLSELPVVKSKRVALSLEDDGLP

SEQ ID NO: 77 - protein, 897 aa, Homo sapiens
MVLAQGLLSMALLALCWERSLAGAEETIPLQTLRCYNDYTSHITCRWADTQDAQRLVNVTLIRRVNEDLLEPVSCDLSDDMPWSACPHPRCVPRRCVIPCQSFVVTDVDYFSFQPDRPLGTRLTVTLTQHVQPPEPRDLQISTDQDHFLLTWSVALGSPQSHWLSPGDLEFEVVYKRLQDSWEDAAILLSNTSQATLGPEHLMPSSTYVARVRTRLAPGSRLSGRPSKWSPEVCWDSQPGDEAQPQNLECFFDGAAVLSCSWEVRKEVASSVSFGLFYKPSPDAGEEECSPVLREGLGSLHTRHHCQIPVPDPATHGQYIVSVQPRRAEKHIKSSVNIQMAPPSLNVTKDGDSYSLRWETMKMRYEHIDHTFEIQYRKDTATWKDSKTETLQNAHSMALPALEPSTRYWARVRVRTSRTGYNGIWSEWSEARSWDTESVLPMWVLALIVIFLTIAVLLALRFCGIYGYRLRRKWEEKIPNPSKSHLFQNGSAELWPPGSMSAFTSGSPPHQGPWGSRFPELEGVFPVGFGDSEVSPLTIEDPKHVCDPPSGPDTTPAASDLPTEQPPSPQPGPPAASHTPEKQASSFDFNGPYLGPPHSRSLPDILGQPEPPQEGGSQKSPPPGSLEYLCLPAGGQVQLVPLAQAMGPGQAVEVERRPSQGAAGSPSLESGGGPAPPALGPRVGGQDQKDSPVAIPMSSGDTEDPGVASGYVSSADLVFTPNSGASSVSLVPSLGLPSDQTPSLCPGLASGPPGAPGPVKSGFEGYVELPPIEGRSPRSPRNNPVPPEAKSPVLNPGERPADVSPTSPQPEGLLVLQQVGDYCFLPGLGPGPLSLRSKPSSPGPGPEIKNLDQAFQVKKPPGQAVPQVPVIQLFKALKQQDYLSLPPWEVNKPGEVC

SEQ ID NO: 78 - protein, 325 aa, Homo sapiens
MAWSLGSWLGGCLLVSALGMVPPPENVRMNSVNFKNILQWESPAFAKGNLTFTAQYLSYRIFQDKCMNTTLTECDFSSLSKYGDHTLRVRAEFADEHSDWVNITFCPVDDTIIGPPGMQVEVLADSLHMRFLAPKIENEYETWTMKNVYNSWTYNVQYWKNGTDEKFQITPQYDFEVLRNLEPWTTYCVQVRGFLPDRNKAGEWSEPVCEQTTHDETVPSWMVAVILMASVFMVCLALLGCFALLWCVYKKTKYAFSPRNSLPQHLKEFLGHPHHNTLLFFSFPLSDENDVFDKLSVIAEDSESGKQNPGDSCSLGTPPGQGPQS

SEQ ID NO: 79 - protein, 489 aa, Homo sapiens
MALLFLLPLVMQGVSRAEMGTADLGPSSVPTPTNVTIESYNMNPIVYWEYQIMPQVPVFTVEVKNYGVKNSEWIDACINISHHYCNISDHVGDPSNSLWVRVKARVGQKESAYAKSEEFAVCRDGKIGPPKLDIRKEEKQIMIDIFHPSVFVNGDEQEVDYDPETTCYIRVYNVYVRMNGSEIQYKILTQKEDDCDEIQCQLAIPVSSLNSQYCVSAEGVLHVWGVTTEKSKEVCITIFNSSIKGSLWIPVVAALLLFLVLSLVFICFYIKKINPLKEKSIILPKSLISVVRSATLETKPESKYVSLITSYQPFSLEKEVVCEEPLSPATVPGMHTEDNPGKVEHTEELSSITEVVTTEENIPDVVPGSHLTPIERESSSPLSSNQSEPGSIALNSYHSRNCSESDHSRNGFDTDSSCLESHSSLSDSEFPPNNKGEIKTEGQELITVIKAPTSFGYDKPHVLVDLLVDDSGKESLIGYRPTEDSKEFS

SEQ ID NO: 80 - protein, 1221 aa, Homo sapiens
MMFRSDRMWSCHWKWKPSPLLFLFALYIMCVPHSVWGCANCRVVLSNPSGTFTSPCYPNDYPNSQACMWTLRAPTGYIIQITFNDFDIEEAPNCIYDSLSLDNGESQTKFCGATAKGLSFNSSANEMHVSFSSDFSIQKKGFNASYIRVAVSLRNQKVILPQTSDAYQVSVAKSISIPELSAFTLCFEATKVGHEDSDWTAFSYSNASFTQLLSFGKAKSGYFLSISDSKCLLNNALPVKEKEDIFAESFEQLCLVWNNSLGSIGVNFKRNYETVPCDSTISKVIPGNGKLLLGSNQNEIVSLKGDIYNFRLWNFTMNAKILSNLSCNVKGNVVDWQNDFWNIPNLALKAESNLSCGSYLIPLPAAELASCADLGTLCQATVNSPSTTPPTVTTNMPVTNRIDKQRNDGIIYRISVVIQNILRHPEVKVQSKVAEWLNSTFQNWNYTVYVVNISFHLSAGEDKIKVKRSLEDEPRLVLWALLVYNATNNTNLEGKIIQQKLLKNNESLDEGLRLHTVNVRQLGHCLAMEEPKGYYWPSIQPSEYVLPCPDKPGFSASRICFYNATNPLVTYWGPVDISNCLKEANEVANQILNLTADGQNLTSANITNIVEQVKRIVNKEENIDITLGSTLMNIFSNILSSSDSDLLESSSEALKTIDELAFKIDLNSTSHVNITTRNLALSVSSLLPGTNAISNFSIGLPSNNESYFQMDFESGQVDPLASVILPPNLLENLSPEDSVLVRRAQFTFFNKTGLFQDVGPQRKTLVSYVMACSIGNITIQNLKDPVQIKIKHTRTQEVHHPICAFWDLNKNKSFGGWNTSGCVAHRDSDASETVCLCNHFTHFGVLMDLPRSASQLDARNTKVLTFISYIGCGISAIFSAATLLTYVAFEKLRRDYPSKILMNLSTALLFLNLLFLLDGWITSFNVDGLCIAVAVLLHFFLLATFTWMGLEAIHMYIALVKVFNTYIRRYILKFCIIGWGLPALVVSVVLASRNNNEVYGKESYGKEKGDEFCWIQDPVIFYVTCAGYFGVMFFLNIAMFIVVMVQICGRNGKRSNRTLREEVLRNLRSVVSLTFLLGMTWGFAFFAWGPLNIPFMYLFSIFNSLQGLFIFIFHCAMKENVQKQWRQHLCCGRFRLADNSDWSKTATNIIKKSSDNLGKSLSSSSIGSNSTYLTSKSKSSSTTYFKRNSHTDNVSYEHSFNKSGSLRQCFHGQVLVKTGPC

SEQ ID NO: 81 - protein, 412 aa, Homo sapiens
MPIMGSSVYITVELAIAVLAILGNVLVCWAVWLNSNLQNVTNYFVVSLAAADIAVGVLAIPFAITISTGFCAACHGCLFIACFVLVLTQSSIFSLLAIAIDRYIAIRIPLRYNGLVTGTRAKGIIAICWVLSFAIGLTPMLGWNNCGQPKEGKNHSQGCGEGQVACLFEDVVPMNYMVYFNFFACVLVPLLLMLGVYLRIFLAARRQLKQMESQPLPGERARSTLQKEVHAAKSLAIIVGLFALCWLPLHIINCFTFFCPDCSHAPLWLMYLAIVLSHTNSVVNPFIYAYRIREFRQTFRKIIRSHVLRQQEPFKAAGTSARVLAAHGSDGEQVSLRLNGHPPGVWANGSAPHPERRPNGYALGLVSGGSAQESQGNTGLPDVELLSHELKGVCPEPPGLDDPLAQDGAGVS

SEQ ID NO: 82 - protein, 492 aa, Homo sapiens
MVKFPALTHYWPLIRFLVPLGITNIAIDFGEQALNRGIAAVKEDAVEMLASYGLAYSLMKFFTGPMSDFKNVGLVFVNSKRDRTKAVLCMVVAGAIAAVFHTLIAYSDLGYYIINKLHHVDESVGSKTRRAFLYLAAFPFMDAMAWTHAGILLKHKYSFLVGCASISDVIAQVVFVAILLHSHLECREPLLIPILSLYMGALVRCTTLCLGYYKNIHDIIPDRSGPELGGDATIRKMLSFWWPLALILATQRISRPIVNLFVSRDLGGSSAATEAVAILTATYPVGHMPYGWLTEIRAVYPAFDKNNPSNKLVSTSNTVTAAHIKKFTFVCMALSLTLCFVMFWTPNVSEKILIDIIGVDFAFAELCVVPLRIFSFFPVPVTVRAHLTGWLMTLKKTFVLAPSSVLRIIVLIASLVVLPYLGVHGATLGVGSLLAGFVGESTMVAIAACYVYRKQKKKMENESATEGEDSAMTDMPPTEEVTDIVEMREENE

SEQ ID NO: 83 - protein, 1287 aa, Homo sapiens
MHPDLGPLCTLLYVTLTILCSSVSSDLAPYFTSEPLSAVQKLGGPVVLHCSAQPVTTRISWLHNGKTLDGNLEHVKIHQGTLTILSLNSSLLGYYQCLANNSIGAIVSGPATVSVAVLGDFGSSTKHVITAEEKSAGFIGCRVPESNPKAEVRYKIRGKWLEHSTENYLILPSGNLQILNVSLEDKGSYKCAAYNPVTHQLKVEPIGRKLLVSRPSSDDVHILHPTHSQALAVLSRSPVTLECVVSGVPAPQVYWLKDGQDIAPGSNWRRLYSHLATDSVDPADSGNYSCMAGNKSGDVKYVTYMVNVLEHASISKGLQDQIVSLGATVHFTCDVHGNPAPNCTWFHNAQPIHPSARHLTAGNGLKISGVTVEDVGMYQCVADNGIGFMHSTGRLEIENDGGFKPVIITAPVSAKVADGDFVTLSCNASGLPVPVIRWYDSHGLITSHPSQVLRSKSRKSQLSRPEGLNLEPVYFVLSQAGASSLHIQAVTQEHAGKYICEAANEHGTTQAEASLMVVPFETNTKAETVTLPDAAQNDDRSKRDGSETGLLSSFPVKVHPSAVESAPEKNASGISVPDAPIILSPPQTHTPDTYNLVWRAGKDGGLPINAYFVKYRKLDDGVGMLGSWHTVRVPGSENELHLAELEPSSLYEVLMVARSAAGEGQPAMLTFRTSKEKTASSKNTQASSPPVGIPKYPVVSEAANNNFGVVLTDSSRHSGVPEAPDRPTISTASETSVYVTWIPRANGGSPITAFKVEYKRMRTSNWLVAAEDIPPSKLSVEVRSLEPGSTYKFRVIAINHYGESFRSSASRPYQVVGFPNRFSSRPITGPHIAYTEAVSDTQIMLKWTYIPSSNNNTPIQGFYIYYRPTDSDNDSDYKRDVVEGSKQWHMIGHLQPETSYDIKMQCFNEGGESEFSNVMICETKVKRVPGASEYPVKDLSTPPNSLGSGGNVGPATSPARSSDMLYLIVGCVLGVMVLILMVFIAMCLWKNRQQNTIQKYDPPGYLYQGSDMNGQMVDYTTLSGASQINGNVHGGFLTNGGLSSGYSHLHHKVPNAVNGIVNGSLNGGLYSGHSNSLTRTHVDFEHPHHLVNGGGMYTAVPQIDPLECVNCRNCRNNNRCFTKTNSTFSSSPPPVVPVVAPYPQDGLEMKPLSHVKVPVCLTSAVPDCGQLPEESVKDNVEPVPTQRTCCQDIVNDVSSDGSEDPAEFSRGQEGMINLRIPDHLQLAKSCVWEGDSCAHSETEINIVSWNALILPPVPEGCAEKTMWSPPGIPLDSPTEVLQQPRET

SEQ ID NO: 84 - protein, 807 aa, Homo sapiens
MMDSPFLELWQSKAVSIREQLGLGDRPNDSYCYNSAKNSTVLQGVTFGGIPTVLLIDVSCFLFLILVFSIIRRRFWDYGRIALVSEADSESRFQRLSSTSSSGQQDFENELGCCPWLTAIFRLHDDQILEWCGEDAIHYLSFQRHIIFLLVVVSFLSLCVILPVNLSGDLLDKDPYSFGRTTIANLQTDNDLLWLHTIFAVIYLFLTVGFMRHHTQSIKYKEENLVRRTLFITGLPRDARKETVESHFRDAYPTCEVVDVQLCYNVAKLIYLCKEKKKTEKSLTYYTNLQVKTGQRTLINPKPCGQFCCCEVLGCEWEDAISYYTRMKDRLLERITEEERHVQDQPLGMAFVTFQEKSMATYILKDFNACKCQSLQCKGEPQPSSHSRELYTSKWTVTFAADPEDICWKNLSIQGLRWWLQWLGINFTLFLGLFFLTTPSIILSTMDKFNVTKPIHALNNPIISQFFPTLLLWSFSALLPSIVYYSTLLESHWTKSGENQIMMTKVYIFLIFMVLILPSLGLTSLDFFFRWLFDKTSSEASIRLECVFLPDQGAFFVNYVIASAFIGNGMELLRLPGLILYTFRMIMAKTAADRRNVKQNQAFQYEFGAMYAWMLCVFTVIVAYSITCPIIAPFGLIYILLKHMVDRHNLYFVYLPAKLEKGIHFAAVNQALAAPILCLFWLYFFSFLRLGMKAPATLFTFLVLLLTILVCLAHTCFGCFKHLSPLNYKTEEPASDKGSEAEAHMPPPFTPYVPRILNGLASERTALSPQQQQQQTYGAIHNISGTIPGQCLAQSATGSVAAAPQEA

SEQ ID NO: 85 - protein, 1032 aa, Homo sapiens
MGFCRSALHPLSLLVQAIMLAMTLALGTLPAFLPCELQPHGLVNCNWLFLKSVPHFSMAAPRGNVTSLSLSSNRIHHLHDSDFAHLPSLRHLNLKWNCPPVGLSPMHFPCHMTIEPSTFLAVPTLEELNLSYNNIMTVPALPKSLISLSLSHTNILMLDSASLAGLHALRFLFMDGNCYYKNPCRQALEVAPGALLGLGNLTHLSLKYNNLTVVPRNLPSSLEYLLLSYNRIVKLAPEDLANLTALRVLDVGGNCRRCDHAPNPCMECPRHFPQLHPDTFSHLSRLEGLVLKDSSLSWLNASWFRGLGNLRVLDLSENFLYKCITKTKAFQGLTQLRKLNLSFNYQKRVSFAHLSLAPSFGSLVALKELDMHGIFFRSLDETTLRPLARLPMLQTLRLQMNFINQAQLGIFRAFPGLRYVDLSDNRISGASELTATMGEADGGEKVWLQPGDLAPAPVDTPSSEDFRPNCSTLNFTLDLSRNNLVTVQPEMFAQLSHLQCLRLSHNCISQAVNGSQFLPLTGLQVLDLSHNKLDLYHEHSFTELPRLEALDLSYNSQPFGMQGVGHNFSFVAHLRTLRHLSLAHNNIHSQVSQQLCSTSLRALDFSGNALGHMWAEGDLYLHFFQGLSGLIWLDLSQNRLHTLLPQTLRNLPKSLQVLRLRDNYLAFFKWWSLHFLPKLEVLDLAGNQLKALTNGSLPAGTRLRRLDVSCNSISFVAPGFFSKAKELRELNLSANALKTVDHSWFGPLASALQILDVSANPLHCACGAAFMDFLLEVQAAVPGLPSRVKCGSPGQLQGLSIFAQDLRLCLDEALSWDCFALSLLAVALGLGVPMLHHLCGWDLWYCFHLCLAWLPWRGRQSGRDEDALPYDAFVVFDKTQSAVADWVYNELRGQLEECRGRWALRLCLEERDWLPGKTLFENLWASVYGSRKTLFVLAHTDRVSGLLRASFLLAQQRLLEDRKDVVVLVILSPDGRRSRYVRLRQRLCRQSVLLWPHQPSGQRSFWAQLGMALTRDNHHFYNRNFCQGPTAE

SEQ ID NO: 86 - protein, 620 aa, Homo sapiens
MATKEKLQCLKDFHKDILKPSPGKSPGTRPEDEAEGKPPQREKWSSKIDFVLSVAGGFVGLGNVWRFPYLCYKNGGGAFLIPYFIFLFGSGLPVFFLEIIIGQYTSEGGITCWEKICPLFSGIGYASVVIVSLLNVYYIVILAWATYYLFQSFQKELPWAHCNHSWNTPHCMEDTMRKNKSVWITISSTNFTSPVIEFWERNVLSLSPGIDHPGSLKWDLALCLLLVWLVCFFCIWKGVRSTGKVVYFTATFPFAMLLVLLVRGLTLPGAGAGIKFYLYPDITRLEDPQVWIDAGTQIFFSYAICLGAMTSLGSYNKYKYNSYRDCMLLGCLNSGTSFVSGFAIFSILGFMAQEQGVDIADVAESGPGLAFIAYPKAVTMMPLPTFWSILFFIMLLLLGLDSQFVEVEGQITSLVDLYPSFLRKGYRREIFIAFVCSISYLLGLTMVTEGGMYVFQLFDYYAASGVCLLWVAFFECFVIAWIYGGDNLYDGIEDMIGYRPGPWMKYSWAVITPVLCVGCFIFSLVKYVPLTYNKTYVYPNWAIGLGWSLALSSMLCVPLVIVIRLCQTEGPFLVRVKYLLTPREPNRWAVEREGATPYNSRTVMNGALVKPTHIIVETMM

SEQ ID NO: 87 - protein, 243 aa, Homo sapiens
MCSRGWDSCLALELLLLPLSLLVTSIQGHLVHMTVVSGSNVTLNISESLPENYKQLTWFYTFDQKIVEWDSRKSKYFESKFKGRVRLDPQSGALYISKVQKEDNSTYIMRVLKKTGNEQEWKIKLQVLDPVPKPVIKIEKIEDMDDNCYLKLSCVIPGESVNYTWYGDKRPFPKELQNSVLETTLMPHNYSRCYTCQVSNSVSSKNGTVCLSPPCTLARSFGVEWIASWLVVTVPTILGLLLT

SEQ ID NO: 88 - protein, 300 aa, Homo sapiens
MANCEFSPVSGDKPCCRLSRRAQLCLGVSILVLILVVVLAVVVPRWRQQWSGPGTTKRFPETVLARCVKYTEIHPEMRHVDCQSVWDAFKGAFISKHPCNITEEDYQPLMKLGTQTVPCNKILLWSRIKDLAHQFTQVQRDMFTLEDTLLGYLADDLTWCGEFNTSKINYQSCPDWRKDCSNNPVSVFWKTVSRRFAEAACDVVHVMLNGSRSKIFDKNSTFGSVEVHNLQPEKVQTLEAWVIHGGREDSRDLCQDPTIKELESIISKRNIQFSCKNIYRPDKFLQCVKNPEDSSCTSEI

SEQ ID NO: 89 - protein, 590 aa, Homo sapiens
MTLHNNSTTSPLFPNISSSWIHSPSDAGLPPGTVTHFGSYNVSRAAGNFSSPDGTTDDPLGGHTVWQVVFIAFLTGILALVTIIGNILVIVSFKVNKQLKTVNNYFLLSLACADLIIGVISMNLFTTYIIMNRWALGNLACDLWLAIDYVASNASVMNLLVISFDRYFSITRPLTYRAKRTTKRAGVMIGLAWVISFVLWAPAILFWQYFVGKRTVPPGECFIQFLSEPTITFGTAIAAFYMPVTIMTILYWRIYKETEKRTKELAGLQASGTEAETENFVHPTGSSRSCSSYELQQQSMKRSNRRKYGRCHFWFTTKSWKPSSEQMDQDHSSSDSWNNNDAAASLENSASSDEEDIGSETRAIYSIVLKLPGHSTILNSTKLPSSDNLQVPEEELGMVDLERKADKLQAQKSVDDGGSFPKSFSKLPIQLESAVDTAKTSDVNSSVGKSTATLPLSFKEATLAKRFALKTRSQITKRKRMSLVKEKKAAQTLSAILLAFIITWTPYNIMVLVNTFCDSCIPKTFWNLGYWLCYINSTVNPVCYALCNKTFRTTFKMLLLCQCDKKKRRKQQYQQRQSVIFHKRAPEQAL

SEQ ID NO: 90 - protein, 554 aa, Homo sapiens
MTAPGAAGRCPPTTWLGSLLLLVCLLASRSITEEVSEYCSHMIGSGHLQSLQRLIDSQMETSCQITFEFVDQEQLKDPVCYLKKAFLLVQDIMEDTMRFRDNTPNAIAIVQLQELSLRLKSCFTKDYEEHDKACVRTFYETPLQLLEKVKNVFNETKNLLDKDWNIFSKNCNNSFAECSSQDVVTKPDCNCLYPKAIPSSDPASVSPHQPLAPSMAPVAGLTWEDSEGTEGSSLLPGEQPLHTVDPGSAKQRPPRSTCQSFEPPETPVVKDSTIGGSPQPRPSVGAFNPGMEDILDSAMGTNWVPEEASGEASEIPVPQGTELSPSRPGGGSMQTEPARPSNFLSASSPLPASAKGQQPADVTGTALPRVGPVRPTGQDWNHTPQKTDHPSALLRDPPEPGSPRISSLRPQGLSNPSTLSAQPQLSRSHSSGSVLPLGELEGRRSTRDRRSPAEPEGGPASEGAARPLPRFNSVPLTDTGHERQSEGSFSPQLQESVFHLLVPSVILVLLAVGGLLFYRWRRRSHQEPQRADSPLEQPEGSPLTQDDRQVELPV

SEQ ID NO: 91 - protein, 1325 aa, Homo sapiens
MLPVYQEVKPNPLQDANLCSRVFFWWLNPLFKIGHKRRLEEDDMYSVLPEDRSQHLGEELQGFWDKEVLRAENDAQKPSLTRAIIKCYWKSYLVLGIFTLIEESAKVIQPIFLGKIINYFENYDPMDSVALNTAYAYATVLTFCTLILAILHHLYFYHVQCAGMRLRVAMCHMIYRKALRLSNMAMGKTTTGQIVNLLSNDVNKFDQVTVFLHFLWAGPLQAIAVTALLWMEIGISCLAGMAVLIILLPLQSCFGKLFSSLRSKTATFTDARIRTMNEVITGIRIIKMYAWEKSFSNLITNLRKKEISKILRSSCLRGMNLASFFSASKIIVFVTFTTYVLLGSVITASRVFVAVTLYGAVRLTVTLFFPSAIERVSEAIVSIRRIQTFLLLDEISQRNRQLPSDGKKMVHVQDFTAFWDKASETPTLQGLSFTVRPGELLAVVGPVGAGKSSLLSAVLGELAPSHGLVSVHGRIAYVSQQPWVFSGTLRSNILFGKKYEKERYEKVIKACALKKDLQLLEDGDLTVIGDRGTTLSGGQKARVNLARAVYQDADIYLLDDPLSAVDAEVSRHLFELCICQILHEKITILVTHQLQYLKAASQILILKDGKMVQKGTYTEFLKSGIDFGSLLKKDNEESEQPPVPGTPTLRNRTFSESSVWSQQSSRPSLKDGALESQDTENVPVTLSEENRSEGKVGFQAYKNYFRAGAHWIVFIFLILLNTAAQVAYVLQDWWLSYWANKQSMLNVTVNGGGNVTEKLDLNWYLGIYSGLTVATVLFGIARSLLVFYVLVNSSQTLHNKMFESILKAPVLFFDRNPIGRILNRFSKDIGHLDDLLPLTFLDFIQTLLQVVGVVSVAVAVIPWIAIPLVPLGIIFIFLRRYFLETSRDVKRLESTTRSPVFSHLSSSLQGLWTIRAYKAEERCQELFDAHQDLHSEAWFLFLTTSRWFAVRLDAICAMFVIIVAFGSLILAKTLDAGQVGLALSYALTLMGMFQWCVRQSAEVENMMISVERVIEYTDLEKEAPWEYQKRPPPAWPHEGVIIFDNVNFMYSPGGPLVLKHLTALIKSQEKVGIVGRTGAGKSSLISALFRLSEPEGKIWIDKILTTEIGLHDLRKKMSIIPQEPVLFTGTMRKNLDPFNEHTDEELWNALQEVQLKETIEDLPGKMDTELAESGSNFSVGQRQLVCLARAILRKNQILIIDEATANVDPRTDELIQKKIREKFAHCTVLTIAHRLNTIIDSDKIMVLDSGRLKEYDEPYVLLQNKESLFYKMVQQLGKAEAAALTETAKQVYFKRNYPHIGHTDHMVTNTSNGQPSTLTIFETAL

SEQ ID NO: 92 - DNA, 349 bp, Homo sapiens
  misc_feature (24)..(24): n is a, c, g, or t
  misc_feature (70)..(70): n is a, c, g, or t
  misc_feature (89)..(89): n is a, c, g, or t
  misc_feature (93)..(93): n is a, c, g, or t
  misc_feature (108)..(108): n is a, c, g, or t
  misc_feature (159)..(159): n is a, c, g, or t
  misc_feature (189)..(189): n is a, c, g, or t
  misc_feature (191)..(191): n is a, c, g, or t
  misc_feature (202)..(202): n is a, c, g, or t
  misc_feature (283)..(284): n is a, c, g, or t
  misc_feature (309)..(309): n is a, c, g, or t
  misc_feature (321)..(321): n is a, c, g, or t
  misc_feature (329)..(329): n is a, c, g, or t
  misc_feature (337)..(340): n is a, c, g, or t
  misc_feature (344)..(344): n is a, c, g, or t
mdrsrssarhrahrassggahtvnhgyaaagrdmtvvgdhvadgggaggcggggcdrysaagdccgrvvnsgrtktctgdkrrmrydrnydrnrsdayyysggrrrvnvdsrygamkrdgrrrrdrvwyssgargavsvvsvctrdkdyastsdsaagnstsgsragasssdvvtcwsvracskatsrnmndvaytgtargngamsarvrvrvrksrhskggtkasmrggvssavyaaddtsgssdawwavvtmttvgygdmhvtggkvgscaagvtavvvsnnyyhrtgsymhvgschsssarkarsnstsksymvggmnhsatktgnstatcttnnnnscvnkktdv

SEQ ID NO: 93 - DNA, 315 bp, Homo sapiens
  misc_feature (10)..(10): n is a, c, g, or t
  misc_feature (49)..(49): n is a, c, g, or t
  misc_feature (58)..(59): n is a, c, g, or t
  misc_feature (73)..(73): n is a, c, g, or t
  misc_feature (92)..(92): n is a, c, g, or t
  misc_feature (95)..(95): n is a, c, g, or t
  misc_feature (102)..(102): n is a, c, g, or t
  misc_feature (109)..(109): n is a, c, g, or t
  misc_feature (115)..(115): n is a, c, g, or t
  misc_feature (158)..(158): n is a, c, g, or t
  misc_feature (161)..(161): n is a, c, g, or t
  misc_feature (165)..(165): n is a, c, g, or t
  misc_feature (178)..(178): n is a, c, g, or t
  misc_feature (193)..(193): n is a, c, g, or t
  misc_feature (206)..(206): n is a, c, g, or t
  misc_feature (217)..(217): n is a, c, g, or t
  misc_feature (224)..(224): n is a, c, g, or t
  misc_feature (272)..(272): n is a, c, g, or t
  misc_feature (280)..(280): n is a, c, g, or t
  misc_feature (287)..(287): n is a, c, g, or t
  misc_feature (310)..(311): n is a, c, g, or t
mwgrrvgksnrkdystmssvtvgmcvhvrcssyvdstdsdvhgywragndswkavatnnawavtrdrhgdtknctsrdarmsdagryrmkgnkwnykydsvnvtathrngtsgcntcsvwacgtmswmgtsvshsttrssvthhgtstcvtgagvttnrtnvsyntvtvggtastagnssssvgsrvcavdsnarswtwrstyssnvvhgdgtcransgshvsnsytgkmrvsgvgavggagatavscvvvrscrkksaraadvgdgmkdantrgsasgntswaddnrhhgaahssgryashkgdsgatnnyskk

SEQ ID NO: 94 - DNA, 256 bp, Homo sapiens
  misc_feature (2)..(2): n is a, c, g, or t
  misc_feature (21)..(21): n is a, c, g, or t
  misc_feature (46)..(46): n is a, c, g, or t
  misc_feature (64)..(64): n is a, c, g, or t
  misc_feature (74)..(74): n is a, c, g, or t
  misc_feature (125)..(125): n is a, c, g, or t
  misc_feature (182)..(182): n is a, c, g, or t
  misc_feature (194)..(194): n is a, c, g, or t
  misc_feature (198)..(198): n is a, c, g, or t
mnatgtvascaagghsrvhynhsgragrggdgggargsvaascvvnvaatshmrsrrwvyycvntsdtgaayanvsgartraawrgtaaaststagratmvrvasgatktsrvyggcwaagmgwnccadrcssyskrycvagvatmgygarvasgkaraarrkarrktvmavcwggadvgsnwayrgmdwaavnsavnysrsrvcravsccgcrgmrggdcaravahsgasttdssrrdsrgsrssrmrssssvrs

SEQ ID NO: 95 - protein, 274 aa, Homo sapiens
MGKSLSHLPLHSSKEDAYDGVTSENMRNGLVNSEVHNEDGRNGDVSQFPYVEFTGRDSVTCPTCQGTGRIPRGQENQLVALIPYSDQRLRPRRTKLYVMASVFVCLLLSGLAVFFLFPRSIDVKYIGVKSAYVSYDVQKRTIYLNITNTLNITNNNYYSVEVENITAQVQFSKTVIGKARLNNITIIGPLDMKQIDYTVPTVIAEEMSYMYDFCTLISIKVHNIVLMMQVTVTTTYFGHSEQISQERYQYVDCGRNTTYQLGQSEYLNVLQPQQ

SEQ ID NO: 96 - protein, 459 aa, Homo sapiens
MEGSASPPEKPRARPAAAVLCRGPVEPLVFLANFALVLQGPLTTQYLWHRFSADLGYNGTRQRGGCSNRSADPTMQEVETLTSHWTLYMNVGGFLVGLFSSTLLGAWSDSVGRRPLLVLASLGLLLQALVSVFVVQLQLHVGYFVLGRILCALLGDFGGLLAASFASVADVSSSRSRTFRMALLEASIGVAGMLASLLGGHWLRAQGYANPFWLALALLIAMTLYAAFCFGETLKEPKSTRLFTFRHHRSIVQLYVAPAPEKSRKHLALYSLAIFVVITVHFGAQDILTLYELSTPLCWDSKLIGYGSAAQHLPYLTSLLALKLLQYCLADAWVAEIGLAFNILGMVVFAFATITPLMFTGYGLLFLSLVITPVIRAKLSKLVRETEQGALFSAVACVNSLAMLTASGIFNSLYPATLNFMKGFPFLLGAGLLLIPAVLIGMLEKADPHLEFQQFPQSP

SEQ ID NO: 97 - protein, 343 aa, Homo sapiens
MWSHLNRLLFWSIFSSVTCRKAVLDCEAMKTNEFPSPCLDSKTKVVMKGQNVSMFCSHKNKSLQITYSLFRRKTHLGTQDGKGEPAIFNLSITEAHESGPYKCKAQVTSCSKYSRDFSFTIVDPVTSPVLNIMVIQTETDRHITLHCLSVNGSLPINYTFFENHVAISPAISKYDREPAEFNLTKKNPGEEEEYRCEAKNRLPNYATYSHPVTMPSTGGDSCPFCLKLLLPGLLLLLVVIILILAFWVLPKYKTRKAMRNNVPRDRGDTAMEVGIYANILEKQAKEESVPEVGSRPCVSTAQDEAKHSQELQYATPVFQEVAPREQEACDSYKSGYVYSELNF

SEQ ID NO: 98 - protein, 583 aa, Homo sapiens
MPLRKMKIPFLLLFFLWEAESHAASRPNIILVMADDLGIGDPGCYGNKTIRTPNIDRLASGGVKLTQHLAASPLCTPSRAAFMTGRYPVRSGMASWSRTGVFLFTASSGGLPTDEITFAKLLKDQGYSTALIGKWHLGMSCHSKTDFCHHPLHHGFNYFYGISLTNLRDCKPGEGSVFTTGFKRLVFLPLQIVGVTLLTLAALNCLGLLHVPLGVFFSLLFLAALILTLFLGFLHYFRPLNCFMMRNYEIIQQPMSYDNLTQRLTVEAAQFIQRNTETPFLLVLSYLHVHTALFSSKDFAGKSQHGVYGDAVEEMDWSVGQILNLLDELRLANDTLIYFTSDQGAHVEEVSSKGEIHGGSNGIYKGGKANNWEGGIRVPGILRWPRVIQAGQKIDEPTSNMDIFPTVAKLAGAPLPEDRIIDGRDLMPLLEGKSQRSDHEFLFHYCNAYLNAVRWHPQNSTSIWKAFFFTPNFNPVGSNGCFATHVCFCFGSYVTHHDPPLLFDISKDPRERNPLTPASEPRFYEILKVMQEAADRHTQTLPEVPDQFSWNNFLWKPWLQLCCPSTGLSCQCDREKQDKRLSR

SEQ ID NO: 99 - protein, 335 aa, Homo sapiens
MLGIWTLLPLVLTSVARLSSKSVNAQVTDINSKGLELRKTVTTVETQNLEGLHHDGQFCHKPCPPGERKARDCTVNGDEPDCVPCQEGKEYTDKAHFSSKCRRCRLCDEGHGLEVEINCTRTQNTKCRCKPNFFCNSTVCEHCDPCTKCEHGIIKECTLTSNTKCKEEGSRSNLGWLCLLLLPIPLIVWVKRKEVQKTCRKHRKENQGSHESPTLNPETVAINLSDVDLSKYITTIAGVMTLSQVKGFVRKNGVNEAKIDEIKNDNVQDTAEQKVQLLRNWHQLHGKKEAYDTLIKDLKKANLCTLAEKIQTIILKDITSDSENSNFRNEIQSLV

SEQ ID NO: 100 - protein, 448 aa, Homo sapiens
MLTFMASDSEEEVCDERTSLMSAESPTPRSCQEGRQGPEDGENTAQWRSQENEEDGEEDPDRYVCSGVPGRPPGLEEELTLKYGAKHVIMLFVPVTLCMIVVVATIKSVRFYTEKNGQLIYTPFTEDTPSVGQRLLNSVLNTLIMISVIVVMTIFLVVLYKYRCYKFIHGWLIMSSLMLLFLFTYIYLGEVLKTYNVAMDYPTLLLTVWNFGAVGMVCIHWKGPLVLQQAYLIMISALMALVFIKYLPEWSAWVILGAISVYDLVAVLCPKGPLRMLVETAQERNEPIFPALIYSSAMVWTVGMAKLDPSSQGALQLPYDPEMEEDSYDSFGEPSYPEVFEPPLTGYPGEELEEEEERGVKLGLGDFIFYSVLVGKAAATGSGDWNTTLACFVAILIGLCLTLLLLAVFKKALPALPISITFGLIFYFSTDNLVRPFMDTLASHQLYI

SEQ ID NO: 101 - protein, 722 aa, Homo sapiens
MPLHQLGDKPLTFPSPNSAMENGLDHTPPSRRASPGTPLSPGSLRSAAHSPLDTSKQPLCQLWAEKHGARGTHEVRYVSAGQSVACGWWAFAPPCLQVLNTPKGILFFLCAAAFLQGMTVNGFINTVITSLERRYDLHSYQSGLIASSYDIAACLCLTFVSYFGGSGHKPRWLGWGVLLMGTGSLVFALPHFTAGRYEVELDAGVRTCPANPGAVCADSTSGLSRYQLVFMLGQFLHGVGATPLYTLGVTYLDENVKSSCSPVYIAIFYTAAILGPAAGYLIGGALLNIYTEMGRRTELTTESPLWVGAWWVGFLGSGAAAFFTAVPILGYPRQLPGSQRYAVMRAAEMHQLKDSSRGEASNPDFGKTIRDLPLSIWLLLKNPTFILLCLAGATEATLITGMSTFSPKFLESQFSLSASEAATLFGYLVVPAGGGGTFLGGFFVNKLRLRGSAVIKFCLFCTVVSLLGILVFSLHCPSVPMAGVTASYGGSLLPEGHLNLTAPCNAACSCQPEHYSPVCGSDGLMYFSLCHAGCPAATETNVDGQKVYRDCSCIPQNLSSGFGHATAGKCTSTCQRKPLLLVFIFVVIFFTFLSSIPALTATLRCVRDPQRSFALGIQWIVVRILGGIPGPIAFGWVIDKACLLWQDQCGQQGSCLVYQNSAMSRYILIMGLLYKVLGVLFFAIACFLYKPLSESSDGLETCLPSQSSAPDSATDSQLQSSV

SEQ ID NO: 102 - protein, 710 aa, Homo sapiens
MQGKKPGGSSGGGRSGELQGDEAQRNKKKKKKVSCFSNIKIFLVSECALMLAQGTVGAYLVSVLTTLERRFNLQSADVGVIASSFEIGNLALILFVSYFGARGHRPRLIGCGGIVMALGALLSALPEFLTHQYKYEAGEIRWGAEGRDVCAANGSGGDEGPDPDLICRNRTATNMMYLLLIGAQVLLGIGATPVQPLGVSYIDDHVRRKDSSLYIGILFTMLVFGPACGFILGSFCTKIYVDAVFIDTSNLDITPDDPRWIGAWWGGFLLCGALLFFSSLLMFGFPQSLPPHSEPAMESEQAMLSEREYERPKPSNGVLRHPLEPDSSASCFQQLRVIPKVTKHLLSNPVFTCIILAACMEIAVVAGFAAFLGKYLEQQFNLTTSSANQLLGMTAIPCACLGIFLGGLLVKKLSLSALGAIRMAMLVNLVSTACYVSFLFLGCDTGPVAGVTVPYGNSTAPGSALDPYSPCNNNCECQTDSFTPVCGADGITYLSACFAGCNSTNLTGCACLTTVPAENATVVPGKCPSPGCQEAFLTFLCVMCICSLIGAMAQTPSVIILIRTVSPELKSYALGVLFLLLRLLGFIPPPLIFGAGIDSTCLFWSTFCGEQGACVLYDNVVYRYLYVSIAIALKSFAFILYTTTWQCLRKNYKRYIKNHEGGLSTSEFFASTLTLDNLGRDPVPANQTHRTKFIYNLEDHEWCENMESVL

SEQ ID NO: 103 - protein, 183 aa, Homo sapiens
MQAPRAALVFALVIALVPVGRGNYEELENSGDTTVESERPNKVTIPSTFAAVTIKETLNANINSTNFAPDENQLEFILMVLIPLILLVLLLLSVVFLATYYKRKRTKQEPSSQGSQSALQTYELGSENVKVPIFEEDTPSVMEIEMEELDKWMNSMNRNADFECLPTLKEEKESNHNPSDSES

SEQ ID NO: 104 - protein, 761 aa, Homo sapiens
MALPALGLDPWSLLGLFLFQLLQLLLPTTTAGGGGQGPMPRVRYYAGDERRALSFFHQKGLQDFDTLLLSGDGNTLYVGAREAILALDIQDPGVPRLKNMIPWPASDRKKSECAFKKKSNETQCFNFIRVLVSYNVTHLYTCGTFAFSPACTFIELQDSYLLPISEDKVMEGKGQSPFDPAHKHTAVLVDGMLYSGTMNNFLGSEPILMRTLGSQPVLKTDNFLRWLHHDASFVAAIPSTQVVYFFFEETASEFDFFERLHTSRVARVCKNDVGGEKLLQKKWTTFLKAQLLCTQPGQLPFNVIRHAVLLPADSPTAPHIYAVFTSQWQVGGTRSSAVCAFSLLDIERVFKGKYKELNKETSRWTTYRGPETNPRPGSCSVGPSSDKALTFMKDHFLMDEQVVGTPLLVKSGVEYTRLAVETAQGLDGHSHLVMYLGTTTGSLHKAVVSGDSSAHLVEEIQLFPDPEPVRNLQLAPTQGAVFVGFSGGVWRVPRANCSVYESCVDCVLARDPHCAWDPESRTCCLLSAPNLNSWKQDMERGNPEWACASGPMSRSLRPQSRPQIIKEVLAVPNSILELPCPHLSALASYYWSHGPAAVPEASSTVYNGSLLLIVQDGVGGLYQCWATENGFSYPVISYWVDSQDQTLALDPELAGIPREHVKVPLTRVSGGAALAAQQSYWPHFVTVTVLFALVLSGALIILVASPLRALRARGKVQGCETLRPGEKAPLSREQHLQSPKECRTSASDVDADNNCLGTEVA

SEQ ID NO: 105 - protein, 1437 aa, Homo sapiens
MKDIDIGKEYIIPSPGYRSVRERTSTSGTHRDREDSKFRRTRPLECQDALETAARAEGLSLDASMHSQLRILDEEHPKGKYHHGLSALKPIRTTSKHQHPVDNAGLFSCMTFSWLSSLARVAHKKGELSMEDVWSLSKHESSDVNCRRLERLWQEELNEVGPDAASLRRVVWIFCRTRLILSIVCLMITQLAGFSGPAFMVKHLLEYTQATESNLQYSLLLVLGLLLTEIVRSWSLALTWALNYRTGVRLRGAILTMAFKKILKLKNIKEKSLGELINICSNDGQRMFEAAAVGSLLAGGPVVAILGMIYNVIILGPTGFLGSAVFILFYPAMMFASRLTAYFRRKCVAATDERVQKMNEVLTYIKFIKMYAWVKAFSQSVQKIREEERRILEKAGYFQSITVGVAPIVVVIASVVTFSVHMTLGFDLTAAQAFTVVTVFNSMTFALKVTPFSVKSLSEASVAVDRFKSLFLMEEVHMIKNKPASPHIKIEMKNATLAWDSSHSSIQNSPKLTPKMKKDKRASRGKKEKVRQLQRTEHQAVLAEQKGHLLLDSDERPSPEEEEGKHIHLGHLRLQRTLHSIDLEIQEGKLVGICGSVGSGKTSLISAILGQMTLLEGSIAISGTFAYVAQQAWILNATLRDNILFGKEYDEERYNSVLNSCCLRPDLAILPSSDLTEIGERGANLSGGQRQRISLARALYSDRSIYILDDPLSALDAHVGNHIFNSAIRKHLKSKTVLFVTHQLQYLVDCDEVIFMKEGCITERGTHEELMNLNGDYATIFNNLLLGETPPVEINSKKETSGSQKKSQDKGPKTGSVKKEKAVKPEEGQLVQLEEKGQGSVPWSVYGVYIQAAGGPLAFLVIMALFMLNVGSTAFSTWWLSYWIKQGSGNTTVTRGNETSVSDSMKDNPHMQYYASIYALSMAVMLILKAIRGVVFVKGTLRASSRLHDELFRRILRSPMKFFDTTPTGRILNRFSKDMDEVDVRLPFQAEMFIQNVILVFFCVGMIAGVFPWFLVAVGPLVILFSVLHIVSRVLIRELKRLDNITQSPFLSHITSSIQGLATIHAYNKGQEFLHRYQELLDDNQAPFFLFTCAMRWLAVRLDLISIALITTTGLMIVLMHGQIPPAYAGLAISYAVQLTGLFQFTVRLASETEARFTSVERINHYIKTLSLEAPARIKNKAPSPDWPQEGEVTFENAEMRYRENLPLVLKKVSFTIKPKEKIGIVGRTGSGKSSLGMALFRLVELSGGCIKIDGVRISDIGLADLRSKLSIIPQEPVLFSGTVRSNLDPFNQYTEDQIWDALERTHMKECIAQLPLKLESEVMENGDNFSVGERQLLCIARALLRHCKILILDEATAAMDTETDLLIQETIREAFADCTMLTIAHRLHTVLGSDRIMVLAQGQVVEFDTPSVLLSNDSSRFYAMFAAAENKVAVKG

SEQ ID NO: 106 - protein, 1074 aa, Homo sapiens
MAPGMSGRGGAALLCLSALLAHASGRSHPASPSPPGPQASPVLPVSYRLSHTRLAFFLREARPPSPAVANSSLQRSEPFVVFQTKELPVLNVSLGPFSTSQVVARELLQPSSTLDIPERLTVNWKVRAFIVRSHVPASQPVVQVLFYVAGRDWDDFGVTERLPCVRLHAFRDAREVKSSCRLSGGLATCLVRAELPLAWFGPPAPAAPPTARRKSPDGLEPEATGESQQAELYYTLHAPDASGGCGGSRRGAGPGVGARAESPTQHPLLRIGSISLFRPPPRRTLQEHRLDSNLMIRLPDRPLKPGEVLSILLYLAPNSSSPSSPSVEHFTLRVKAKKGVTLLGTKSRSGQWHVTSELLTGAKHSTATVDVAWAQSTPLPPREGQGPLEILQLDFEMENFTSQSVKRRIMWHIDYRGHGALPDLERAVTELTVIQRDVQAILPLAMDTEIINTAILTGRTVAIPVKVIAIEVNGLVLDISALVECESDNEDIIKVSSSCDYVFVSGKESRGSMNARVTFRYDVLNAPLEMTVWVPKLPLHIELSDARLSQVKGWRVPILPDRRSVRESEDEDEEEEERRQSASRGCTLQYQHATLQVFTQFHTTSSEGTDQVVTMLGPDWLVEVTDLVSDFMRVGDPRVAHMVDSSTLAGLEPGTTPFKVVSPLTEAVLGETLLTVTEEKVSITQLQAQVVASLALSLRPSPGSSHTILATTAAQQTLSFLKQEALLSLWLSYSDGTTAPLSLYSPRDYGLLVSSLDEHVATVTQDRAFPLVVAEAEGSGELLRAELTIAESCQKTKRKSVLATTPVGLRVHFGRDEEDPTYDYPGPSQPGPGGGEDEARGAGPPGSALPAPEAPGPGTASPVVPPTEDFLPLPTGFLQVPRGLTDLEIGMYALLGVFCLAILVFLINCIVFVLRYRHKRIPPEGQTSMDHSHHWVFLGNGQPLRVQGELSPPAGNPLETVPAFCHGDHHSSGSSQTSVQSQVHGRGDGSSGGSARDQAEDPASSPTSKRKRVKFTTFTTLPSEELAYDSVPAGEEDEEEEEDLGWGCPDVAGPTRPTAPPDLHNYMRRIKEIA

SEQ ID NO: 107 - protein, 931 aa, Homo sapiens
MRKGLRATAARCGLGLGYLLQMLVLPALALLSASGTGSAAQDDDFFHELPETFPSDPPEPLPHFLIEPEEAYIVKNKPVNLYCKASPATQIYFKCNSEWVHQKDHIVDERVDETSGLIVREVSIEISRQQVEELFGPEDYWCQCVAWSSAGTTKSRKAYVRIAYLRKTFEQEPLGKEVSLEQEVLLQCRPPEGIPVAEVEWLKNEDIIDPVEDRNFYITIDHNLIIKQARLSDTANYTCVAKNIVAKRKSTTATVIVYVNGGWSTWTEWSVCNSRCGRGYQKRTRTCTNPAPLNGGAFCEGQSVQKIACTTLCPVDGRWTPWSKWSTCGTECTHWRRRECTAPAPKNGGKDCDGLVLQSKNCTDGLCMQTAPDSDDVALYVGIVIAVIVCLAISVVVALFVYRKNHRDFESDIIDSSALNGGFQPVNIKAARQDLLAVPPDLTSAAAMYRGPVYALHDVSDKIPMTNSPILDPLPNLKIKVYNTSGAVTPQDDLSEFTSKLSPQMTQSLLENEALSLKNQSLARQTDPSCTAFGSFNSLGGHLIVPNSGVSLLIPAGAIPQGRVYEMYVTVHRKETMRPPMDDSQTLLTPVVSCGPPGALLTRPVVLTMHHCADPNTEDWKILLKNQAAQGQWEDVVVVGEENFTTPCYIQLDAEACHILTENLSTYALVGHSTTKAAAKRLKLAIFGPLCCSSLEYSIRVYCLDDTQDALKEILHLERQMGGQLLEEPKALHFKGSTHNLRLSIHDIAHSLWKSKLLAKYQEIPFYHVWSGSQRNLHCTFTLERFSLNTVELVCKLCVRQVEGEGQIFQLNCTVSEEPTGIDLPLLDPANTITTVTGPSAFSIPLPIRQKLCSSLDAPQTRGHDWRMLAHKLNLDRYLNYFATKSSPTGVILDLWEAQNFPDGNLSMLAAVLEEMGRHETVVSLAAEGQY

SEQ ID NO: 108 - protein, 552 aa, Homo sapiens
MGCSAKARWAAGALGVAGLLCAVLGAVMIVMVPSLIKQQVLKNVRIDPSSLSFNMWKEIPIPFYLSVYFFDVMNPSEILKGEKPQVRERGPYVYREFRHKSNITFNNNDTVSFLEYRTFQFQPSKSHGSESDYIVMPNILVLGAAVMMENKPMTLKLIMTLAFTTLGERAFMNRTVGEIMWGYKDPLVNLINKYFPGMFPFKDKFGLFAELNNSDSGLFTVFTGVQNISRIHLVDKWNGLSKVDFWHSDQCNMINGTSGQMWPPFMTPESSLEFYSPEACRSMKLMYKESGVFEGIPTYRFVAPKTLFANGSIYPPNEGFCPCLESGIQNVSTCRFSAPLFLSHPHFLNADPVLAEAVTGLHPNQEAHSLFLDIHPVTGIPMNCSVKLQLSLYMKSVAGIGQTGKIEPVVLPLLWFAESGAMEGETLHTFYTQLVLMPKVMHYAQYVLLALGCVLLLVPVICQIRSQVGAGQRAARADSHSLACWGKGASDRTLWPTAAWSPPPAAVLRLCRSGSGHCWGLRSTLASFACRVATTLPVLEGLGPSLGGGTGS

SEQ ID NO: 109 - protein, 755 aa, Homo sapiens
MARKLSVILILTFALSVTNPLHELKAAAFPQTTEKISPNWESGINVDLAISTRQYHLQQLFYRYGENNSLSVEGFRKLLQNIGIDKIKRIHIHHDHDHHSDHEHHSDHERHSDHEHHSEHEHHSDHDHHSHHNHAASGKNKRKALCPDHDSDSSGKDPRNSQGKGAHRPEHASGRRNVKDSVSASEVTSTVYNTVSEGTHFLETIETPRPGKLFPKDVSSSTPPSVTSKSRVSRLAGRKTNESVSEPRKGFMYSRNTNENPQECFNASKLLTSHGMGIQVPLNATEFNYLCPAIINQIDARSCLIHTSEKKAEIPPKTYSLQIAWVGGFIAISIISFLSLLGVILVPLMNRVFFKFLLSFLVALAVGTLSGDAFLHLLPHSHASHHHSHSHEEPAMEMKRGPLFSHLSSQNIEESAYFDSTWKGLTALGGLYFMFLVEHVLTLIKQFKDKKKKNQKKPENDDDVEIKKQLSKYESQLSTNEEKVDTDDRTEGYLRADSQEPSHFDSQQPAVLEEEEVMIAHAHPQEVYNEYVPRGCKNKCHSHFHDTLGQSDDLIHHHHDYHHILHHHHHQNHHPHSHSQRYSREELKDAGVATLAWMVIMGDGLHNFSDGLAIGAAFTEGLSSGLSTSVAVFCHELPHELGDFAVLLKAGMTVKQAVLYNALSAMLAYLGMATGIFIGHYAENVSMWIFALTAGLFMYVALVDMVPEMLHNDASDHGCSRWGYFFLQNAGMLLGFGIMLLISIFEHKIVFRINF

SEQ ID NO: 110 - protein, 937 aa, Homo sapiens
MHRPRRRGTRPPLLALLAALLLAARGAAAQETELSVSAELVPTSSWNISSELNKDSYLTLDEPMNNITTSLGQTAELHCKVSGNPPPTIRWFKNDAPVVQEPRRLSFRSTIYGSRLRIRNLDTTDTGYFQCVATNGKEVVSSTGVLFVKFGPPPTASPGYSDEYEEDGFCQPYRGIACARFIGNRTVYMESLHMQGEIENQITAAFTMIGTSSHLSDKCSQFAIPSLCHYAFPYCDETSSVPKPRDLCRDECEILENVLCQTEYIFARSNPMILMRLKLPNCEDLPQPESPEAANCIRIGIPMADPINKNHKCYNSTGVDYRGTVSVTKSGRQCQPWNSQYPHTHTFTALRFPELNGGHSYCRNPGNQKEAPWCFTLDENFKSDLCDIPACDSKDSKEKNKMEILYILVPSVAIPLAIALLFFFICVCRNNQKSSSAPVQRQPKHVRGQNVEMSMLNAYKPKSKAKELPLSAVRFMEELGECAFGKIYKGHLYLPGMDHAQLVAIKTLKDYNNPQQWTEFQQEASLMAELHHPNIVCLLGAVTQEQPVCMLFEYINQGDLHEFLIMRSPHSDVGCSSDEDGTVKSSLDHGDFLHIAIQIAAGMEYLSSHFFVHKDLAARNILIGEQLHVKISDLGLSREIYSADYYRVQSKSLLPIRWMPPEAIMYGKFSSDSDIWSFGVVLWEIFSFGLQPYYGFSNQEVIEMVRKRQLLPCSEDCPPRMYSLMTECWNEIPSRRPRFKDIHVRLRSWEGLSSHTSSTTPSGGNATTQTTSLSASPVSNLSNPRYPNYMFPSQGITPQGQIAGFIGPPIPQNQRFIPINGYPIPPGYAAFPAAHYQPTGPPRVIQHCPPPKSRSPSSASGSTSTGHVTSLPSSGSNQEANIPLLPHMSIPNHPGGMGITVFGNKSQKPYKIDSKQASLLGDANIHGHTESMISAEL

SEQ ID NO: 111 - protein, 759 aa, Homo sapiens
MGLADASGPRDTQALLSATQAMDLRRRDYHMERPLLNQEHLEELGRWGSAPRTHQWRTWLQCSRARAYALLLQHLPVLVWLPRYPVRDWLLGDLLSGLSVAIMQLPQGLAYALLAGLPPVFGLYSSFYPVFIYFLFGTSRHISVGTFAVMSVMVGSVTESLAPQALNDSMINETARDAARVQVASTLSVLVGLFQVGLGLIHFGFVVTYLSEPLVRGYTTAAAVQVFVSQLKYVFGLHLSSHSGPLSLIYTVLEVCWKLPQSKVGTVVTAAVAGVVLVVVKLLNDKLQQQLPMPIPGELLTLIGATGISYGMGLKHRFEVDVVGNIPAGLVPPVAPNTQLFSKLVGSAFTIAVVGFAIAISLGKIFALRHGYRVDSNQELVALGLSNLIGGIFQCFPVSCSMSRSLVQESTGGNSQVAGAISSLFILLIIVKLGELFHDLPKAVLAAIIIVNLKGMLRQLSDMRSLWKANRADLLIWLVTFTATILLNLDLGLVVAVIFSLLLVVVRTQMPHYSVLGQVPDTDIYRDVAEYSEAKEVRGVKVFRSSATVYFANAEFYSDALKQRCGVDVDFLISQKKKLLKKQEQLKLKQLQKEEKLRKQAASPKGASVSINVNTSLEDMRSNNVEDCKMMQVSSGDKMEDATANGQEDSKAPDGSTLKALGLPQPDFHSLILDLGALSFVDTVCLKSLKNIFHDFREIEVEVYMAACHSPVVSQLEAGHFFDASITKKHLFASVHDAVTFALQHPRPVPDSPVSVTRL

SEQ ID NO: 112 - protein, 958 aa, Homo sapiens
MHTCCPPVTLEQDLHRKMHSWMLQTLAFAVTSLVLSCAETIDYYGEICDNACPCEEKDGILTVSCENRGIISLSEISPPRFPIYHLLLSGNLLNRLYPNEFVNYTGASILHLGSNVIQDIETGAFHGLRGLRRLHLNNNKLELLRDDTFLGLENLEYLQVDYNYISVIEPNAFGKLHLLQVLILNDNLLSSLPNNLFRFVPLTHLDLRGNRLKLLPYVGLLQHMDKVVELQLEENPWNCSCELISLKDWLDSISYSALVGDVVCETPFRLHGRDLDEVSKQELCPRRLISDYEMRPQTPLSTTGYLHTTPASVNSVATSSSAVYKPPLKPPKGTRQPNKPRVRPTSRQPSKDLGYSNYGPSIAYQTKSPVPLECPTACSCNLQISDLGLNVNCQERKIESIAELQPKPYNPKKMYLTENYIAVVRRTDFLEATGLDLLHLGNNRISMIQDRAFGDLTNLRRLYLNGNRIERLSPELFYGLQSLQYLFLQYNLIREIQSGTFDPVPNLQLLFLNNNLLQAMPSGVFSGLTLLRLNLRSNHFTSLPVSGVLDQLKSLIQIDLHDNPWDCTCDIVGMKLWVEQLKVGVLVDEVICKAPKKFAETDMRSIKSELLCPDYSDVVVSTPTPSSIQVPARTSAVTPAVRLNSTGAPASLGAGGGASSVPLSVLILSLLLVFIMSVFVAAGLFVLVMKRRKKNQSDHTSTNNSDVSSFNMQYSVYGGGGGTGGHPHAHVHHRGPALPKVKTPAGHVYEYIPHPLGHMCKNPIYRSREGNSVEDYKDLHELKVTYSSNHHLQQQQQPPPPPQQPQQQPPPQLQLQPGEEERRESHHLRSPAYSVSTIEPREDLLSPVQDADRFYRGILEPDKHCSTTPAGNSLPEYPKFPCSPAAYTFSPNYDLRRPHQYLHPGAGDSRLREPVLYSPPSAVFVEPNRNEYLELKAKLNVEPDYLEVLEKQTTFSQF

SEQ ID NO: 113 - protein, 325 aa, Homo sapiens [sequence omitted]

SEQ ID NO: 114 - protein, 715 aa, Homo sapiens
MVPGARGGGALARAAGRGLLALLLAVSAPLRLQAEELGDGCGHLVTYQDSGTMTSKNYPGTYPNHTVCEKTITVPKGKRLILRLGDLDIESQTCASDYLLFTSSSDQYGPYCGSMTVPKELLLNTSEVTVRFESGSHISGRGFLLTYASSDHPDLITCLERASHYLKTEYSKFCPAGCRDVAGDISGNMVDGYRDTSLLCKAAIHAGIIADELGGQISVLQRKGISRYEGILANGVLSRDGSLSDKRFLFTSNGCSRSLSFEPDGQIRASSSWQSVNESGDQVHWSPGQARLQDQGPSWASGDSSNNHKPREWLEIDLGEKKKITGIRTTGSTQSNFNFYVKSFVMNFKNNNSKWKTYKGIVNNEEKVFQGNSNFRDPVQNNFIPPIVARYVRVVPQTWHQRIALKVELIGCQITQGNDSLVWRKTSQSTSVSTKKEDETITRPIPSEETSTGINITTVAIPLVLLVVLVFAGMGIFAAFRKKKKKGSPYGSAEAQKTDCWKQIKYPFARHQSAEFTISYDNEKEMTQKLDLITSDMADYQQPLMIGTGTVTRKGSTFRPMDTDAEEAGVSTDAGGHYDCPQRAGRHEYALPLAPPEPEYATPIVERHVLRAHTFSAQSGYRVPGPQPGHKHSLSSGGFSPVAGVGAQDGDYQRPHSAQPADRGYDRPKAVSALATESGHPDSQKPPTHPGTSDSYSAPRDCLTPLNQTAMTALL

SEQ ID NO: 115 - protein, 1445 aa, Homo sapiens
MQGPPLLTAAHLLCVCTAALAVAPGPRFLVTAPGIIRPGGNVTIGVELLEHCPSQVTVKAELLKTASNLTVSVLEAEGVFEKGSFKTLTLPSLPLNSADEIYELRVTGRTQDEILFSNSTRLSFETKRISVFIQTDKALYKPKQEVKFRIVTLFSDFKPYKTSLNILIKDPKSNLIQQWLSQQSDLGVISKTFQLSSHPILGDWSIQVQVNDQTYYQSFQVSEYVLPKFEVTLQTPLYCSMNSKHLNGTITAKYTYGKPVKGDVTLTFLPLSFWGKKKNITKTFKINGSANFSFNDEEMKNVMDSSNGLSEYLDLSSPGPVEILTTVTESVTGISRNVSTNVFFKQHDYIIEFFDYTTVLKPSLNFTATVKVTRADGNQLTLEERRNNVVITVTQRNYTEYWSGSNSGNQKMEAVQKINYTVPQSGTFKIEFPILEDSSELQLKAYFLGSKSSMAVHSLFKSPSKTYIQLKTRDENIKVGSPFELVVSGNKRLKELSYMVVSRGQLVAVGKQNSTMFSLTPENSWTPKACVIVYYIEDDGEIISDVLKIPVQLVFKNKIKLYWSKVKAEPSEKVSLRISVTQPDSIVGIVAVDKSVNLMNASNDITMENVVHELELYNTGYYLGMFMNSFAVFQECGLWVLTDANLTKDYIDGVYDNAEYAERFMEENEGHIVDIHDFSLGSSPHVRKHFPETWIWLDTNMGYRIYQEFEVTVPDSITSWVATGFVISEDLGLGLTTTPVELQAFQPFFIFLNLPYSVIRGEEFALEITIFNYLKDATEVKVIIEKSDKFDILMTSNEINATGHQQTLLVPSEDGATVLFPIRPTHLGEIPITVTALSPTASDAVTQMILVKAEGIEKSYSQSILLDLTDNRLQSTLKTLSFSFPPNTVTGSERVQITAIGDVLGPSINGLASLIRMPYGCGEQNMINFAPNIYILDYLTKKKQLTDNLKEKALSFMRQGYQRELLYQREDGSFSAFGNYDPSGSTWLSAFVLRCFLEADPYIDIDQNVLHRTYTWLKGHQKSNGEFWDPGRVIHSELQGGNKSPVTLTAYIVTSLLGYRKYQPNIDVQESIHFLESEFSRGISDNYTLALITYALSSVGSPKAKEALNMLTWRAEQEGGMQFWVSSESKLSDSWQPRSLDIEVAAYALLSHFLQFQTSEGIPIMRWLSRQRNSLGGFASTQDTTVALKALSEFAALMNTERTNIQVTVTGPSSPSPVKFLIDTHNRLLLQTAELAVVQPTAVNISANGFGFAICQLNVVYNVKASGSSRRRRSIQNQEAFDLDVAVKENKDDLNHVDLNVCTSFSGPGRSGMALMEVNLLSGFMVPSEAISLSETVKKVEYDHGKLNLYLDSVNETQFCVNIPAVRNFKVSNTQDASVSIVDYYEPRRQAVRSYNSEVKLSSCDLCSDVQGCRPCEDGASGSHHHSSVIFIFCFKLLYFMELWL

SEQ ID NO: 116 - protein, 482 aa, Homo sapiens
MASFSAETNSTDLLSQPWNEPPVILSMVILSLTFLLGLPGNGLVLWVAGLKMQRTVNTIWFLHLTLADLLCCLSLPFSLAHLALQGQWPYGRFLCKLIPSIIVLNMFASVFLLTAISLDRCLVVFKPIWCQNHRNVGMACSICGCIWVVAFVMCIPVFVYREIFTTDNHNRCGYKFGLSSSLDYPDFYGDPLENRSLENIVQPPGEMNDRLDPSSFQTNDHPWTVPTVFQPQTFQRPSADSLPRGSARLTSQNLYSNVFKPADVVSPKIPSGFPIEDHETSPLDNSDAFLSTHLKLFPSASSNSFYESELPQGFQDYYNLGQFTDDDQVPTPLVAITITRLVVGFLLPSVIMIACYSFIVFRMQRGRFAKSQSKTFRVAVVVVAVFLVCWTPYHIFGVLSLLTDPETPLGKTLMSWDHVCIALASANSCFNPFLYALLGKDFRKKARQSIQGILEAAFSEELTRSTHCPSNNVISERNSTTV

SEQ ID NO: 117 - protein, 193 aa, Homo sapiens
MPEEGSGCSVRRRPYGCVLRAALVPLVAGLVICLVVCIQRFAQAQQQLPLESLGWDVAELQLNHTGPQQDPRLYWQGGPALGRSFLHGPELDKGQLRIHRDGIYMVHIQVTLAICSSTTASRHHPTTLAVGICSPASRSISLLRLSFHQGCTIASQRLTPLARGDTLCTNLTGTLLPSRNTDETFFGVQWVRP

SEQ ID NO: 118 - protein, 569 aa, Homo sapiens
MAPTLATAHRRRWWMACTAVLENLLFSAVLLGWGSLLIMLKSEGFYSYLCTEPENVTNGTVGGTAEPGHEEVSWMNGWLSCQAQDEMLNLAFTVGSFLLSAITLPLGIVMDKYGPRKLRLLGSACFAVSCLLIAYGASKPNALSVLIFIALALNGFGGMCMTFTSLTLPNMFGDLRSTFIALMIGSYASSAVTFPGIKLIYDAGVSFIVVLVVWAGCSGLVFLNCFFNWPLEPFPGPEDMDYSVKIKFSWLGFDHKITGKQFYKQVTTVGRRLSVGSSMRSAKEQVALQEGHKLCLSTVDLEVKCQPDAAVAPSFMHSVFSPILLLSLVTMCVTQLRLIFYMGAMNNILKFLVSGDQKTVGLYTSIFGVLQLLCLLTAPVIGYIMDWRLKECEDASEEPEEKDANQGEKKKKKRDRQIQKITNAMRAFAFTNLLLVGFGVTCLIPNLPLQILSFILHTIVRGFIHSAVGGLYAAVYPSTQFGSLTGLQSLISALFALLQQPLFLAMMGPLQGDPLWVNVGLLLLSLLGFCLPLYLICYRRQLERQLQQRQEDDKLFLKINGSSNQEAFV

SEQ ID NO: 119 - protein, 266 aa, Homo sapiens
MVCLKLPGGSYMAKLTVTLMVLSSPLALAGDTRPRFLQQDKYECHFFNGTERVRFLHRDIYNQEEDLRFDSDVGEYRAVTELGRPDAEYWNSQKDFLEDRRAAVDTYCRHNYGVGESFTVQRRVEPKVTVYPARTQTLQHHNLLVCSVNGFYPGSIEVRWFRNSQEEKAGVVSTGLIQNGDWTFQTLVMLETVPRSGEVYTCQVEHPSVTSPLTVEWRAQSESAQSKMLSGVGGFVLGLLFLGAGLFIYFKNQKGHSGLHPTGLVS

SEQ ID NO: 120 - protein, 1037 aa, Homo sapiens
MRGSGPRGAGRRRPPSGGGDTPITPASLAGCYSAPRRAPLWTCLLLCAALRTLLASPSNEVNLLDSRTVMGDLGWIAFPKNGWEEIGEVDENYAPIHTYQVCKVMEQNQNNWLLTSWISNEGASRIFIELKFTLRDCNSLPGGLGTCKETFNMYYFESDDQNGRNIKENQYIKIDTIAADESFTELDLGDRVMKLNTEVRDVGPLSKKGFYLAFQDVGACIALVSVRVYYKKCPSVVRHLAVFPDTITGADSSQLLEVSGSCVNHSVTDEPPKMHCSAEGEWLVPIGKCMCKAGYEEKNGTCQVCRPGFFKASPHIQSCGKCPPHSYTHEEASTSCVCEKDYFRRESDPPTMACTRPPSAPRNAISNVNETSVFLEWIPPADTGGRKDVSYYIACKKCNSHAGVCEECGGHVRYLPRQSGLKNTSVMMVDLLAHTNYTFEIEAVNGVSDLSPGARQYVSVNVTTNQAAPSPVTNVKKGKIAKNSISLSWQEPDRPNGIILEYEIKYFEKDQETSYTIIKSKETTITAEGLKPASVYVFQIRARTAAGYGVFSRRFEFETTPVFAASSDQSQIPVIAVSVTVGVILLAVVIGVLLSGSCCECGCGRASSLCAVAHPSLIWRCGYSKAKQDPEEEKMHFHNGHIKLPGVRTYIDPHTYEDPNQAVHEFAKEIEASCITIERVIGAGEFGEVCSGRLKLPGKRELPVAIKTLKVGYTEKQRRDFLGEASIMGQFDHPNIIHLEGVVTKSKPVMIVTEYMENGSLDTFLKKNDGQFTVIQLVGMLRGISAGMKYLSDMGYVHRDLAARNILINSNLVCKVSDFGLSRVLEDDPEAAYTTRGGKIPIRWTAPEAIAFRKFTSASDVWSYGIVMWEVVSYGERPYWEMTNQDVIKAVEEGYRLPSPMDCPAALYQLMLDCWQKERNSRPKFDEIVNMLDKLIRNPSSLKTLVNASCRVSNLLAEHSPLGSGAYRSVGEWLEAIKMGRYTEIFMENGYSSMDAVAQVTLEDLRRLGVTLVGHQKKIMNSLQEMKVQLVNGMVPL

SEQ ID NO: 121 - protein, 478 aa, Homo sapiens
MPPMPSAPPVHPPPDGGWGWIVVGAAFISIGFSYAFPKAVTVFFKEIQQIFHTTYSEIAWISSIMLAVMYAGGPVSSVLVNKYGSRPVVIAGGLLCCLGMVLASFSSSVVQLYLTMGFITGLGLAFNLQPALTIIGKYFYRKRPMANGLAMAGSPVFLSSLAPFNQYLFNTFGWKGSFLILGSLLLNACVAGSLMRPLGPNQTTSKSKNKTGKTEDDSSPKKIKTKKSTWEKVNKYLDFSLFKHRGFLIYLSGNVIMFLGFFAPIIFLAPYAKDQGIDEYSAAFLLSVMAFVDMFARPSVGLIANSKYIRPRIQYFFSFAIMFNGVCHLLCPLAQDYTSLVLYAVFFGLGFGSVSSVLFETLMDLVGAPRFSSAVGLVTIVECGPVLLGPPLAGKLVDLTGEYKYMYMSCGAIVVAASVWLLIGNAINYRLLAKERKEENARQKTRESEPLSKSKHSEDVNVKVSNAQSVTSERETNI

SEQ ID NO: 122 - protein, 1036 aa, Homo sapiens
MYLVAGDRGLAGCGHLLVSLLGLLLLLARSGTRALVCLPCDESKCEEPRNCPGSIVQGVCGCCYTCASQRNESCGGTFGIYGTCDRGLRCVIRPPLNGDSLTEYEAGVCEDENWTDDQLLGFKPCNENLIAGCNIINGKCECNTIRTCSNPFEFPSQDMCLSALKRIEEEKPDCSKARCEVQFSPRCPEDSVLIEGYAPPGECCPLPSRCVCNPAGCLRKVCQPGNLNILVSKASGKPGECCDLYECKPVFGVDCRTVECPPVQQTACPPDSYETQVRLTADGCCTLPTRCECLSGLCGFPVCEVGSTPRIVSRGDGTPGKCCDVFECVNDTKPACVFNNVEYYDGDMFRMDNCRFCRCQGGVAICFTAQCGEINCERYYVPEGECCPVCEDPVYPFNNPAGCYANGLILAHGDRWREDDCTFCQCVNGERHCVATVCGQTCTNPVKVPGECCPVCEEPTIITVDPPACGELSNCTLTGKDCINGFKRDHNGCRTCQCINTEELCSERKQGCTLNCPFGFLTDAQNCEICECRPRPKKCRPIICDKYCPLGLLKNKHGCDICRCKKCPELSCSKICPLGFQQDSHGCLICKCREASASAGPPILSGTCLTVDGHHHKNEESWHDGCRECYCLNGREMCALITCPVPACGNPTIHPGQCCPSCADDFVVQKPELSTPSICHAPGGEYFVEGETWNIDSCTQCTCHSGRVLCETEVCPPLLCQNPSRTQDSCCPQCTDQPFRPSLSRNNSVPNYCKNDEGDIFLAAESWKPDVCTSCICIDSVISCFSESCPSVSCERPVLRKGQCCPYCIEDTIPKKVVCHFSGKAYADEERWDLDSCTHCYCLQGQTLCSTVSCPPLPCVEPINVEGSCCPMCPEMYVPEPTNIPIEKTNHRGEVDLEVPLWPTPSENDIVHLPRDMGHLQVDYRDNRLHPSEDSSLDSIASVVVPIIICLSIIIAFLFINQKKQWIPLLCWYRTPTKPSSLNNQLVSVDCKKGTRVQVDSSQRMLRIAEPDARFSGFYSMQKQNHLQADNFYQTV

SEQ ID NO: 123 - protein, 444 aa, Homo sapiens
MAGGMKVAVSPAVGPGPWGSGVGGGGTVRLLLILSGCLVYGTAETDVNVVMLQESQVCEKRASQQFCYTNVLIPKWHDIWTRIQIRVNSSRLVRVTQVENEEKLKELEQFSIWNFFSSFLKEKLNDTYVNVGLYSTKTCLKVEIIEKDTKYSVIVIRRFDPKLFLVFLLGLMLFFCGDLLSRSQIFYYSTGMTVGIVASLLIIIFILSKFMPKKSPIYVILVGGWSFSLYLIQLVFKNLQEIWRCYWQYLLSYVLTVGFMSFAVCYKYGPLENERSINLLTWTLQLMGLCFMYSGIQIPHIALAIIIIALCTKNLEHPIQWLYITCRKVCKGAEKPVPPRLLTEEEYRIQGEVETRKALEELREFCNSPDCSAWKTVSRIQSPKRFADFVEGSSHLTPNEVSVHEQEYGLGSIIAQDEIYEEASSEEEDSYSRCPAITQNNFLT

SEQ ID NO: 124 - protein, 266 aa, Homo sapiens
MVCLKLPGGSCMAALTVTLTVLSSPLALAGDTQPRFLEQAKCECHFLNGTERVWNLIRYIYNQEEYARYNSDLGEYQAVTELGRPDAEYWNSQKDLLERRRAEVDTYCRYNYGVVESFTVQRRVQPKVTVYPSKTQPLQHHNLLVCSVNGFYPGSIEVRWFRNGQEEKAGVVSTGLIQNGDWTFQTLVMLETVPRSGEVYTCQVEHPSMMSPLTVQWSARSESAQSKMLSGVGGFVLGLLFLGTGLFIYFRNQKGHSGLQPTGLLS

SEQ ID NO: 125 - protein, 658 aa, Homo sapiens
MIPCRAALTFARCLIRRKIVTLDSLEDTKLCRCLSTMDLIALGVGSTLGAGVYVLAGEVAKADSGPSIVVSFLIAALASVMAGLCYAEFGARVPKTGSAYLYTYVTVGELWAFITGWNLILSYVIGTSSVARAWSGTFDELLSKQIGQFLRTYFRMNYTGLAEYPDFFAVCLILLLAGLLSFGVKESAWVNKVFTAVNILVLLFVMVAGFVKGNVANWKISEEFLKNISASAREPPSENGTSIYGAGGFMPYGFTGTLAGAATCFYAFVGFDCIATTGEEVRNPQKAIPIGIVTSLLVCFMAYFGVSAALTLMMPYYLLDEKSPLPVAFEYVGWGPAKYVVAAGSLCALSTSLLGSIFPMPRVIYAMAEDGLLFKCLAQINSKTKTPIIATLSSGAVAALMAFLFDLKALVDMMSIGTLMAYSLVAACVLILRYQPGLSYDQPKCSPEKDGLGSSPRVTSKSESQVTMLQRQGFSMRTLFCPSLLPTQQSASLVSFLVGFLAFLVLGLSVLTTYGVHAITRLEAWSLALLALFLVLFVAIVLTIWRQPQNQQKVAFMVPFLPFLPAFSILVNIYLMVQLSADTWVRFSIWMAIGFLIYFSYGIRHSLEGHLRDENNEEDAYPDNVHAAAEEKSAIQANDHHPRNLSSPFIFHEKTSEF

SEQ ID NO: 126 - protein, 267 aa, Homo sapiens
MVKISFQPAVAGIKGDKADKASASAPAPASATEILLTPAREEQPPQHRSKRGGSVGGVCYLSMGMVVLLMGLVFASVYIYRYFFLAQLARDNFFRCGVLYEDSLSSQVRTQMELEEDVKIYLDENYERINVPVPQFGGGDPADIIHDFQRGLTAYHDISLDKCYVIELNTTIVLPPRNFWELLMNVKRGTYLPQTYIIQEEMVVTEHVSDKEALGSFIYHLCNGKDTYRLRRRATRRRINKRGAKNCNAIRHFENTFVVETLICGVV

SEQ ID NO: 127 - protein, 983 aa, Homo sapiens
MDCQLSILLLLSCSVLDSFGELIPQPSNEVNLLDSKTIQGELGWISYPSHGWEEISGVDEHYTPIRTYQVCNVMDHSQNNWLRTNWVPRNSAQKIYVELKFTLRDCNSIPLVLGTCKETFNLYYMESDDDHGVKFREHQFTKIDTIAADESFTQMDLGDRILKLNTEIREVGPVNKKGFYLAFQDVGACVALVSVRVYFKKCPFTVKNLAMFPDTVPMDSQSLVEVRGSCVNNSKEEDPPRMYCSTEGEWLVPIGKCSCNAGYEERGFMCQACRPGFYKALDGNMKCAKCPPHSSTQEDGSMNCRCENNYFRADKDPPSMACTRPPSSPRNVISNINETSVILDWSWPLDTGGRKDVTFNIICKKCGWNIKQCEPCSPNVRFLPRQFGLTNTTVTVTDLLAHTNYTFEIDAVNGVSELSSPPRQFAAVSITTNQAAPSPVLTIKKDRTSRNSISLSWQEPEHPNGIILDYEVKYYEKQEQETSYTILRARGTNVTISSLKPDTIYVFQIRARTAAGYGTNSRKFEFETSPDSFSISGESSQVVMIAISAAVAIILLTVVIYVLIGRFCGYKSKHGADEKRLHFGNGHLKLPGLRTYVDPHTYEDPTQAVHEFAKELDATNISIDKVVGAGEFGEVCSGRLKLPSKKEISVAIKTLKVGYTEKQRRDFLGEASIMGQFDHPNIIRLEGVVTKSKPVMIVTEYMENGSLDSFLRKHDAQFTVIQLVGMLRGIASGMKYLSDMGYVHRDLAARNILINSNLVCKVSDFGLSRVLEDDPEAAYTTRGGKIPIRWTSPEAIAYRKFTSASDVWSYGIVLWEVMSYGERPYWEMSNQDVIKAVDEGYRLPPPMDCPAALYQLMLDCWQKDRNNRPKFEQIVSILDKLIRNPGSLKIITSAAARPSNLLLDQSNVDITTFRTTGDWLNGVWTAHCKEIFTGVEYSSCDTIAKISTDDMKKVGVTVVGPQKKIISSIKALETQSKNGPVPV

SEQ ID NO: 128 - protein, 280 aa, Homo sapiens
MDLQGRGVPSIDRLRVLLMLFHTMAQIMAEQEVENLSGLSTNPEKDIFVVRENGTTCLMAEFAAKFIVPYDVWASNYVDLITEQADIALTRGAEVKGRCGHSQSELQVFWVDRAYALKMLFVKESHNMSKGPEATWRLSKVQFVYDSSEKTHFKDAVSAGKHTANSHHLSALVTPAGKSYECQAQQTISLASSDPQKTVTMILSAVHIQPFDIISDFVFSEEHKCPVDEREQLEETLPLILGLILGLVIMVTLAIYHVHHKMTANQVQIPRDRSQYKHMG

SEQ ID NO: 129 - protein, 875 aa, Homo sapiens
MIGCGACEPKVKMAGGQAAAALPTWKMAARRSLSARGRGILQAAAGRLLPLLLLSCCCGAGGCAAVGENEETVIIGLRLEDTNDVSFMEGGALRVSERTRVKLRVYGQNINNETWSRIAFTEHERRRHSPGERGLGGPAPPEPDSGPQRCGIRTSDIIILPHIILNRRTSGIIEIEIKPLRKMEKSKSYYLCTSLSTPALGAGGSGSTGGAVGGKGGSGVAGLPPPPWAETTWIYHDGEDTKMIVGEEKKFLLPFWLQVIFISLLLCLSGMFSGLNLGLMALDPMELRIVQNCGTEKEKNYAKRIEPVRRQGNYLLCSLLLGNVLVNTTLTILLDDIAGSGLVAVVVSTIGIVIFGEIVPQAICSRHGLAVGANTIFLTKFFMMMTFPASYPVSKLLDCVLGQEIGTVYNREKLLEMLRVTDPYNDLVKEELNIIQGALELRTKTVEDVMTPLRDCFMITGEAILDFNTMSEIMESGYTRIPVFEGERSNIVDLLFVKDLAFVDPDDCTPLKTITKFYNHPLHFVFNDTKLDAMLEEFKKGKSHLAIVQRVNNEGEGDPFYEVLGIVTLEDVIEEIIKSEILDETDLYTDNRTKKKVAHRERKQDFSAFKQTDSEMKVKISPQLLLAMHRFLATEVEAFSPSQMSEKILLRLLKHPNVIQELKYDEKNKKAPEYYLYQRNKPVDYFVLILQGKVEVEAGKEGMKFEASAFSYYGVMALTASPVPLSLSRTFVVSRTELLAAGSPGENKSPPRPCGLNHSDSLSRSDRIDAVTPTLGSSNNQLNSSLLQVYIPDYSVRALSDLQFVKISRQQYQNALMASRMDKTPQSSDSENTKIELTLTELHDGLPDETANLLNEQNCVTHSKANHSLHNEGAI

SEQ ID NO: 130 - protein, 437 aa, Homo sapiens
MSAVLLLALLGFILPLPGVQALLCQFGTVQHVWKVSDLPRQWTPKNTSCDSGLGCQDTLMLIESGPQVSLVLSKGCTEAKDQEPRVTEHRMGPGLSLISYTFVCRQEDFCNNLVNSLPLWAPQPPADPGSLRCPVCLSMEGCLEGTTEEICPKGTTHCYDGLLRLRGGGIFSNLRVQGCMPQPGCNLLNGTQEIGPVGMTENCNRKDFLTCHRGTTIMTHGNLAQEPTDWTTSNTEMCEVGQVCQETLLLLDVGLTSTLVGTKGCSTVGAQNSQKTTIHSAPPGVLVASYTHFCSSDLCNSASSSSVLLNSLPPQAAPVPGDRQCPTCVQPLGTCSSGSPRMTCPRGATHCYDGYIHLSGGGLSTKMSIQGCVAQPSSFLLNHTRQIGIFSAREKRDVQPPASQHEGGGAEGLESLTWGVGLALAPALWWGVVCPSC

SEQ ID NO: 131 - protein, 831 aa, Homo sapiens
MKVHMHTKFCLICLLTFIFHHCNHCHEEHDHGPEALHRQHRGMTELEPSKFSKQAAENEKKYYIEKLFERYGENGRLSFFGLEKLLTNLGLGERKVVEINHEDLGHDHVSHLDILAVQEGKHFHSHNHQHSHNHLNSENQTVTSVSTKRNHKCDPEKETVEVSVKSDDKHMHDHNHRLRHHHRLHHHLDHNNTHHFHNDSITPSERGEPSNEPSTETNKTQEQSDVKLPKGKRKKKGRKSNENSEVITPGFPPNHDQGEQYEHNRVHKPDRVHNPGHSHVHLPERNGHDPGRGHQDLDPDNEGELRHTRKREAPHVKNNAIISLRKDLNEDDHHHECLNVTQLLKYYGHGANSPISTDLFTYLCPALLYQIDSRLCIEHFDKLLVEDINKDKNLVPEDEANIGASAWICGIISITVISLLSLLGVILVPIINQGCFKFLLTFLVALAVGTMSGDALLHLLPHSQGGHDHSHQHAHGHGHSHGHESNKFLEEYDAVLKGLVALGGIYLLFIIEHCIRMFKHYKQQRGKQKWFMKQNTEESTIGRKLSDHKLNNTPDSDWLQLKPLAGTDDSVVSEDRLNETELTDLEGQQESPPKNYLCIEEEKIIDHSHSDGLHTIHEHDLHAAAHNHHGENKTVLRKHNHQWHHKHSHHSHGPCHSGSDLKETGIANIAWMVIMGDGIHNFSDGLAIGAAFSAGLTGGISTSIAVFCHELPHELGDFAVLLKAGMTVKQAIVYNLLSAMMAYIGMLIGTAVGQYANNITLWIFAVTAGMFLYVALVDMLPEMLHGDGDNEEHGFCPVGQFILQNLGLLFGFAIMLVIALYEDKIVFDIQF

SEQ ID NO: 132 - protein, 1871 aa, Homo sapiens
MPSVCLLLLLFLAVGGALGNRPFRAFVVTDTTLTHLAVHRVTGEVFVGAVNRVFKLAPNLTELRAHVTGPVEDNARCYPPPSMRVCAHRLAPVDNINKLLLIDYAARRLVACGSIWQGICQFLRLDDLFKLGEPHHRKEHYLSGAQEPDSMAGVIVEQGQGPSKLFVGTAVDGKSEYFPTLSSRKLISDEDSADMFSLVYQDEFVSSQIKIPSDTLSLYPAFDIYYIYGFVSASFVYFLTLQLDTQQTLLDTAGEKFFTSKIVRMCAGDSEFYSYVEFPIGCSWRGVEYRLVQSAHLAKPGLLLAQALGVPADEDVLFTIFSQGQKNRASPPRQTILCLFTLSNINAHIRRRIQSCYRGEGTLALPWLLNKELPCINTPMQINGNFCGLVLNQPLGGLHVIEGLPLLADSTDGMASVAAYTYRQHSVVFIGTRSGSLKKVRVDGFQDAHLYETVPVVDGSPILRDLLFSPDHRHIYLLSEKQVSQLPVETCEQYQSCAACLGSGDPHCGWCVLRHRCCREGACLGASAPHGFAEELSKCVQVRVRPNNVSVTSPGVQLTVTLHNVPDLSAGVSCAFEAAAENEAVLLPSGELLCPSPSLQELRALTRGHGATRTVRLQLLSKETGVRFAGADFVFYNCSVLQSCMSCVGSPYPCHWCKYRHTCTSRPHECSFQEGRVHSPEGCPEILPSGDLLIPVGVMQPLTLRAKNLPQPQSGQKNYECVVRVQGRQQRVPAVRFNSSSVQCQNASYSYEGDEHGDTELDFSVVWDGDFPIDKPPSFRALLYKCWAQRPSCGLCLKADPRFNCGWCISEHRCQLRTHCPAPKTNWMHLSQKGTRCSHPRITQIHPLVGPKEGGTRVTIVGDNLGLLSREVGLRVAGVRCNSIPAEYISAERIVCEMEESLVPSPPPGPVELCVGDCSADFRTQSEQVYSFVTPTFDQVSPSRGPASGGTRLTISGSSLDAGSRVTVTVRDSECQFVRRDAKAIVCISPLSTLGPSQAPITLAIDRANISSPGLIYTYTQDPTVTRLEPTWSIINGSTAITVSGTHLLTVQEPRVRAKYRGIETTNTCQVINDTAMLCKAPGIFLGRPQPRAQGEHPDEFGFLLDHVQTARSLNRSSFTYYPDPSFEPLGPSGVLDVKPGSHVVLKGKNLIPAAAGSSRLNYTVLIGGQPCSLTVSDTQLLCDSPSQTGRQPVMVLVGGLEFWLGTLHISAERALTLPAMMGLAAGGGLLLLAITAVLVAYKRKTQDADRTLKRLQLQMDNLESRVALECKEAFAELQTDINELTNHMDEVQIPFLDYRTYAVRVLFPGIEAHPVLKELDTPPNVEKALRLFGQLLHSRAFVLTFIHTLEAQSSFSMRDRGTVASLTMVALQSRLDYATGLLKQLLADLIEKNLESKNHPKLLLRRTESVAEKMLTNWFTFLLHKFLKECAGEPLFLLYCAIKQQMEKGPIDAITGEARYSLSEDKLIRQQIDYKTLTLHCVCPENEGSAQVPVKVLNCDSITQAKDKLLDTVYKGIPYSQRPKAEDMDLEWRQGRMTRIILQDEDVTTKIECDWKRLNSLAHYQVTDGSLVALVPKQVSAYNMANSFTFTRSLSRYESLLRTASSPDSLRSRAPMITPDQETGTKLWHLVKNHDHADHREGDRGSKMVSEIYLTRLLATKGTLQKFVDDLFETVFSTAHRGSALPLAIKYMFDFLDEQADQRQISDPDVRHTWKSNCLPLRFWVNVIKNPQFVFDIHKNSITDACLSVVAQTFMDSCSTSEHRLGKDSPSNKLLYAKDIPNYKSWVERYYRDIAKMASISDQDMDAYLVEQSRLHASDFSVLSALNELYFYVTKYRQEILTALDRDASCRKHKLRQKLEQIISLVSSDS

SEQ ID NO: 133 - protein, 288 aa, Homo sapiens
MQRRWVFVLLDVLCLLVASLPFAILTLVNAPYKRGFYCGDDSIRYPYRPDTITHGLMAGVTITATVILVSAGEAYLVYTDRLYSRSDFNNYVAAVYKVLGTFLFGAAVSQSLTDLAKYMIGRLRPNFLAVCDPDWSRVNCSVYVQLEKVCRGNPADVTEARLSFYSGHSSFGMYCMVFLALYVQARLCWKWARLLRPTVQFFLVAFALYVGYTRVSDYKHHWSDVLVGLLQGALVAALTVCYISDFFKARPPQHCLKEEELERKPSLSLTLTLGEADHNHYGYPHSSS

SEQ ID NO: 134 - protein, 473 aa, Homo sapiens
MGAVLGVFSLASWVPCLCSGASCLLCSCCPNSKNSTVTRLIYAFILLLSTVVSYIMQRKEMETYLKKIPGFCEGGFKIHEADINADKDCDVLVGYKAVYRISFAMAIFFFVFSLLMFKVKTSKDLRAAVHNGFWFFKIAALIGIMVGSFYIPGGYFSSVWFVVGMIGAALFILIQLVLLVDFAHSWNESWVNRMEEGNPRLWYAALLSFTSAFYILSIICVGLLYTYYTKPDGCTENKFFISINLILCVVASIISIHPKIQEHQPRSGLLQSSLITLYTMYLTWSAMSNEPDRSCNPNLMSFITRITAPTLAPGNSTAVVPTPTPPSKSGSLLDSDNFIGLFVFVLCLLYSSIRTSTNSQVDKLTLSGSDSVILGDTTTSGASDEEDGQPRRAVDNEKEGVQYSYSLFHLMLCLASLYIMMTLTSWYSPDAKFQSMTSKWPAVWVKISSSWVCLLLYVWTLVAPLVLTSRDFS

SEQ ID NO: 135 - protein, 1400 aa, Homo sapiens
MRAVLDTADIAIVALYFILVMCIGFFAMWKSNRSTVSGYFLAGRSMTWVTIGASLFVSNIGSEHFIGLAGSGAASGFAVGAWEFNALLLLQLLGWVFIPIYIRSGVYTMPEYLSKRFGGHRIQVYFAALSLILYIFTKLSVDLYSGALFIQESLGWNLYVSVILLIGMTALLTVTGGLVAVIYTDTLQALLMIIGALTLMIISIMEIGGFEEVKRRYMLASPDVTSILLTYNLSNTNSCNVSPKKEALKMLRNPTDEDVPWPGFILGQTPASVWYWCADQVIVQRVLAAKNIAHAKGSTLMAGFLKLLPMFIIVVPGMISRILFTDDIACINPEHCMLVCGSRAGCSNIAYPRLVMKLVPVGLRGLMMAVMIAALMSDLDSIFNSASTIFTLDVYKLIRKSASSRELMIVGRIFVAFMVVISIAWVPIIVEMQGGQMYLYIQEVADYLTPPVAALFLLAIFWKRCNEQGAFYGGMAGFVLGAVRLILAFAYRAPECDQPDNRPGFIKDIHYMYVATGLFWVTGLITVIVSLLTPPPTKEQIRTTTFWSKKNLVVKENCSPKEEPYQMQEKSILRCSENNETINHIIPNGKSEDSIKGLQPEDVNLLVTCREEGNPVASLGHSEAETPVDAYSNGQAALMGEKERKKETDDGGRYWKFIDWFCGFKSKSLSKRSLRDLMEEEAVCLQMLEETRQVKVILNIGLFAVCSLGIFMFVYFSLDYSYDNSFRVTSMQGVINETPLPIDLYQFDDISGKVEQFGKFGVIYYDINQIISTAVMTYTKHFDAHGRIKEIQYEIFRSLMYWITIQYDNMGRVTKREIKIGPFANTTKYAYEYDVDGQLQTVYLNEKIMWRYNYDLNGNLHLLNPSNSARLTPLRYDLRDRITRLGDVQYRLDEDGFLRQRGTEIFEYSSKGLLTRVYSKGSGWTVIYRYDGLGRRVSSKTSLGQHLQFFYADLTYPTRITHVYNHSSSEITSLYYDLQGHLFAMEISSGDEFYIASDNTGTPLAVFSSNGLMLKQIQYTAYGEIYFDSNIDFQLVIGFHGGLYDPLTKLIHFGERDYDILAGRWTTPDIEIWKRIGKDPAPFNLYMFRNNNPASKIHDVKDYITDVNSWLVTFGFHLHNAIPGFPVPKFDLTEPSYELVKSQQWDDIPPIFGVQQQVARQAKAFLSLGKMAEVQVSRRRAGGAQSWLWFATVKSLIGKGVMLAVSQGRVQTNVLNIANEDCIKVAAVLNNAFYLENLHFTIEGKDTHYFIKTTTPESDLGTLRLTSGRKALENGINVTVSQSTTVVNGRTRRFADVEMQFGALALHVRYGMTLDEEKARILEQARQRALARAWAREQQRVRDGEEGARLWTEGEKRQLLSAGKVQGYDGYYVLSVEQYPELADSANNIQFLRQSEIGRR

SEQ ID NO: 136 - protein, 2017 aa, Homo sapiens
MDVKERRPYCSLTKSRREKERRYTNSSADNEECRVPTQKSYSSSETLKAFDHDSSRLLYGNRVKDLVHREADEFTRQGQNFTLRQLGVCEPATRRGLAFCAEMGLPHRGYSISAGSDADTENEAVMSPEHAMRLWGRGVKSGRSSCLSSRSNSALTLTDTEHENKSDSENEQPASNQGQSTLQPLPPSHKQHSAQHHPSITSLNRNSLTNRRNQSPAPPAALPAELQTTPESVQLQDSWVLGSNVPLESRHFLFKTGTGTTPLFSTATPGYTMASGSVYSPPTRPLPRNTLSRSAFKFKKSSKYCSWKCTALCAVGVSVLLAILLSYFIAMHLFGLNWQLQQTENDTFENGKVNSDTMPTNTVSLPSGDNGKLGGFTQENNTIDSGELDIGRRAIQEIPPGIFWRSQLFIDQPQFLKFNISLQKDALIGVYGRKGLPPSHTQYDFVELLDGSRLIAREQRSLLETERAGRQARSVSLHEAGFIQYLDSGIWHLAFYNDGKNAEQVSFNTIVIESVVECPRNCHGNGECVSGTCHCFPGFLGPDCSRAACPVLCSGNGQYSKGRCLCFSGWKGTECDVPTTQCIDPQCGGRGICIMGSCACNSGYKGESCEEADCIDPGCSNHGVCIHGECHCSPGWGGSNCEILKTMCPDQCSGHGTYLQESGSCTCDPNWTGPDCSNEICSVDCGSHGVCMGGTCRCEEGWTGPACNQRACHPRCAEHGTCKDGKCECSQGWNGEHCTIEGCPGLCNSNGRCTLDQNGWHCVCQPGWRGAGCDVAMETLCTDSKDNEGDGLIDCMDPDCCLQSSCQNQPYCRGLPDPQDIISQSLQSPSQQAAKSFYDRISFLIGSDSTHVIPGESPFNKSLASVIRGQVLTADGTPLIGVNVSFFHYPEYGYTITRQDGMFDLVANGGASLTLVFERSPFLTQYHTVWIPWNVFYVMDTLVMKKEENDIPSCDLSGFVRPNPIIVSSPLSTFFRSSPEDSPIIPETQVLHEETTIPGTDLKLSYLSSRAAGYKSVLKITMTQSIIPFNLMKVHLMVAVVGRLFQKWFPASPNLAYTFIWDKTDAYNQKVYGLSEAVVSVGYEYESCLDLTLWEKRTAILQGYELDASNMGGWTLDKHHVLDVQNGILYKGNGENQFISQQPPVVSSIMGNGRRRSISCPSCNGQADGNKLLAPVALACGIDGSLYVGDFNYVRRIFPSGNVTSVLELSSNPAHRYYLATDPVTGDLYVSDTNTRRIYRPKSLTGAKDLTKNAEVVAGTGEQCLPFDEARCGDGGKAVEATLMSPKGMAVDKNGLIYFVDGTMIRKVDQNGIISTLLGSNDLTSARPLTCDTSMHISQVRLEWPTDLAINPMDNSIYVLDNNVVLQITENRQVRIAAGRPMHCQVPGVEYPVGKHAVQTTLESATAIAVSYSGVLYITETDEKKINRIRQVTTDGEISLVAGIPSECDCKNDANCDCYQSGDGYAKDAKLSAPSSLAASPDGTLYIADLGNIRIRAVSKNKPLLNSMNFYEVASPTDQELYIFDINGTHQYTVSLVTGDYLYNFSYSNDNDITAVTDSNGNTLRIRRDPNRMPVRVVSPDNQVIWLTIGTNGCLKSMTAQGLELVLFTYHGNSGLLATKSDETGWTTFFDYDSEGRLTNVTFPTGVVTNLHGDMDKAITVDIESSSREEDVSITSNLSSIDSFYTMVQDQLRNSYQIGYDGSLRIIYASGLDSHYQTEPHVLAGTANPTVAKRNMTLPGENGQNLVEWRFRKEQAQGKVNVFGRKLRVNGRNLLSVDFDRTTKTEKIYDDHRKFLLRIAYDTSGHPTLWLPSSKLMAVNVTYSSTGQIASIQRGTTSEKVDYDGQGRIVSRVFADGKTWSYTYLEKSMVLLLHSQRQYIFEYDMWDRLSAITMPSVARHTMQTIRSIGYYRNIYNPPESNASIITDYNEEGLLLQTAFLGTSRRVLFKYRRQTRLSEILYDSTRVSFTYDETAGVLKTVNLQSDGFICTIRYRQIGPLIDRQIFRFSEDGMVNARF

SEQ ID NO: 137 - protein, 472 aa, Homo sapiens
MELQDPKMNGALPSDAVGYRQEREGFLPSRGPAPGSKPVQFMDFEGKTSFGMSVFNLSNAIMGSGILGLAYAMAHTGVIFFLALLLCIALLSSYSIHLLLTCAGIAGIRAYEQLGQRAFGPAGKVVVATVICLHNVGAMSSYLFIIKSELPLVIGTFLYMDPEGDWFLKGNLLIIIVSVLIILPLALMKHLGYLGYTSGLSLTCMLFFLVSVIYKKFQLGCAIGHNETAMESEALVGLPSQGLNSSCEAQMFTVDSQMSYTVPIMAFAFVCHPEVLPIYTELCRPSKRRMQAVANVSIGAMFCMYGLTATFGYLTFYSSVKAEMLHMYSQKDPLILCVRLAVLLAVTLTVPVVLFPIRRALQQLLFPGKAFSWPRHVAIALILLVLVNVLVICVPTIRDIFGVIGSTSAPSLIFILPSIFYLRIVPSEVEPFLSWPKIQALCFGVLGVLFMAVSLGFMFANWATGQSRMSGH

SEQ ID NO: 138 - protein, 650 aa, Homo sapiens
MMGIGKNTTSKSMEAGSSTEGKYEDEAKHPAFFTLPVVINGGATSSGEQDNEDTELMAIYTTENGIAEKSSLAETLDSTGSLDPQRSDMIYTIEDVPPWYLCIFLGLQHYLTCFSGTIAVPFLLADAMCVGYDQWATSQLIGTIFFCVGITTLLQTTFGCRLPLFQASAFAFLAPARAILSLDKWKCNTTDVSVANGTAELLHTEHIWYPRIREIQGAIIMSSLIEVVIGLLGLPGALLKYIGPLTITPTVALIGLSGFQAAGERAGKHWGIAMLTIFLVLLFSQYARNVKFPLPIYKSKKGWTAYKLQLFKMFPIILAILVSWLLCFIFTVTDVFPPDSTKYGFYARTDARQGVLLVAPWFKVPYPFQWGLPTVSAAGVIGMLSAVVASIIESIGDYYACARLSCAPPPPIHAINRGIFVEGLSCVLDGIFGTGNGSTSSSPNIGVLGITKVGSRRVIQCGAALMLALGMIGKFSALFASLPDPVLGALFCTLFGMITAVGLSNLQFIDLNSSRNLFVLGFSIFFGLVLPSYLRQNPLVTGITGIDQVLNVLLTTAMFVGGCVAFILDNTIPGTPEERGIRKWKKGVGKGNKSLDGMESYNLPFGMNIIKKYRCFSYLPISPTFVGYTWKGLRKSDNSRSSDEDSQATG

SEQ ID NO: 139 - protein, 495 aa, Homo sapiens
MRSPVRDLARNDGEESTDRTPLLPGAPRAEAAPVCCSARYNLAILAFFGFFIVYALRVNLSVALVDMVDSNTTLEDNRTSKACPEHSAPIKVHHNQTGKKYQWDAETQGWILGSFFYGYIITQIPGGYVASKIGGKMLLGFGILGTAVLTLFTPIAADLGVGPLIVLRALEGLGEGVTFPAMHAMWSSWAPPLERSKLLSISYAGAQLGTVISLPLSGIICYYMNWTYVFYFFGTIGIFWFLLWIWLVSDTPQKHKRISHYEKEYILSSLRNQLSSQKSVPWVPILKSLPLWAIVVAHFSYNWTFYTLLTLLPTYMKEILRFNVQENGFLSSLPYLGSWLCMILSGQAADNLRAKWNFSTLCVRRIFSLIGMIGPAVFLVAAGFIGCDYSLAVAFLTISTTLGGFCSSGFSINHLDIAPSYAGILLGITNTFATIPGMVGPVIAKSLTPDNTVGEWQTVFYIAAAINVFGAIFFTLFAKGEVQNWALNDHHGHRH

SEQ ID NO: 140 - protein, 335 aa, Homo sapiens
MGHPPLLPLLLLLHTCVPASWGLRCMQCKTNGDCRVEECALGQDLCRTTIVRLWEEGEELELVEKSCTHSEKTNRTLSYRTGLKITSLTEVVCGLDLCNQGNSGRAVTYSRSRYLECISCGSSDMSCERGRHQSLQCRSPEEQCLDVVTHWIQEGEEGRPKDDRHLRGCGYLPGCPGSNGFHNNDTFHFLKCCNTTKCNEGPILELENLPQNGRQCYSCKGNSTHGCSSEETFLIDCRGPMNQCLVATGTHEPKNQSYMVRGCATASMCQHAHLGDAFSMNHIDVSCCTKSGCNHPDLDVQYRSGAAPQPGPAHLSLTITLLMTARLWGGTLLWT

SEQ ID NO: 141 - protein, 672 aa, Homo sapiens
MPGMVLFGRRWAIASDDLVFPGFFELVVRVLWWIGILTLYLMHRGKLDCAGGALLSSYLIVLMILLAVVICTVSAIMCVSMRGTICNPGPRKSMSKLLYIRLALFFPEMVWASLGAAWVADGVQCDRTVVNGIIATVVVSWIIIAATVVSIIIVFDPLGGKMAPYSSAGPSHLDSHDSSQLLNGLKTAATSVWETRIKLLCCCIGKDDHTRVAFSSTAELFSTYFSDTDLVPSDIAAGLALLHQQQDNIRNNQEPAQVVCHAPGSSQEADLDAELENCHHYMQFAAAAYGWPLYIYRNPLTGLCRIGGDCCRSRTTDYDLVGGDQLNCHFGSILHTTGLQYRDFIHVSFHDKVYELPFLVALDHRKESVVVAVRGTMSLQDVLTDLSAESEVLDVECEVQDRLAHKGISQAARYVYQRLINDGILSQAFSIAPEYRLVIVGHSLGGGAAALLATMLRAAYPQVRCYAFSPPRGLWSKALQEYSQSFIVSLVLGKDVIPRLSVTNLEDLKRRILRVVAHCNKPKYKILLHGLWYELFGGNPNNLPTELDGGDQEVLTQPLLGEQSLLTRWSPAYSFSSDSPLDSSPKYPPLYPPGRIIHLQEEGASGRFGCCSAAHYSAKWSHEAEFSKILIGPKMLTDHMPDILMRALDSVVSDRAACVSCPAQGVSSVDVA

SEQ ID NO: 142 - protein, 327 aa, Homo sapiens
MRALPGLLEARARTPRLLLLQCLLAAARPSSADGSAPDSPFTSPPLREEIMANNFSLESHNISLTEHSSMPVEKNITLERPSNVNLTCQFTTSGDLNAVNVTWKKDGEQLENNYLVSATGSTLYTQYRFTIINSKQMGSYSCFFREEKEQRGTFNFKVPELHGKNKPLISYVGDSTVLTCKCQNCFPLNWTWYSSNGSVKVPVGVQMNKYVINGTYANETKLKITQLLEEDGESYWCRALFQLGESEEHIELVVLSYLVPLKPFLVIVAEVILLVATILLCEKYTQKKKKHSDEGKEFEQIEQLKSDDSNGIENNVPRHRKNESLGQ

SEQ ID NO: 143 - protein, 1381 aa, Homo sapiens
MASPRASRWPPPLLLLLLPLLLLPPAAPGTRDPPPSPARRALSLAPLAGAGLELQLERRPEREPPPTPPRERRGPATPGPSYRAPEPGAATQRGPSGRAPRGGSADAAWKHWPESNTEAHVENITFYQNQEDFSTVSSKEGVMVQTSGKSHAASDAPENLTLLAETADARGRSGSSSRTNFTILPVGYSLEIATALTSQSGNLASESLHLPSSSSEFDERIAAFQTKSGTASEMGTERAMGLSEEWTVHSQEATTSAWSPSFLPALEMGELTTPSRKRNSSGPDLSWLHFYRTAASSPLLDLSSSSESTEKLNNSTGLQSSSVSQTKTMHVATVFTDGGPRTLRSLTVSLGPVSKTEGFPKDSRIATTSSSVLLSPSAVESRRNSRVTGNPGDEEFIEPSTENEFGLTSLRWQNDSPTFGEHQLASSSEVQNGSPMSQTETVSRSVAPMRGGEITAHWLLTNSTTSADVTGSSASYPEGVNASVLTQFSDSTVQSGGSHTALGDRSYSESSSTSSSESLNSSAPRGERSIAGISYGQVRGTAIEQRTSSDHTDHTYLSSTFTKGERALLSITDNSSSSDIVESSTSYIKISNSSHSEYSSFFHAQTERSNISSYDGEYAQPSTESPVLHTSNLPSYTPTINMPNTSVVLDTDAEFVSDSSSSSSSSSSSSSSGPPLPLPSVSQSHHLFSSILPSTRASVHLLKSTSDASTPWSSSPSPLPVSLTTSTSAPLSVSQTTLPQSSSTPVLPRARETPVTSFQTSTMTSFMTMLHSSQTADLKSQSTPHQEKVITESKSPSLVSLPTESTKAVTTNSPLPPSLTESSTEQTLPATSTNLAQMSPTFTTTILKTSQPLMTTPGTLSSTASLVTGPIAVQTTAGKQLSLTHPEILVPQISTEGGISTERNRVIVDATTGLIPLTSVPTSAKEMTTKLGVTAEYSPASRSLGTSPSPQTTVVSTAEDLAPKSATFAVQSSTQSPTTVSSSASVNSCAVNPCLHNGECVADNTSRGYHCRCPPSWQGDDCSVDVNECLSNPCPSTAMCNNTQGSFICKCPVGYQLEKGICNLVRTFVTEFKLKRTFLNTTVEKHSDLQEVENEITKTLNMCFSALPSYIRSTVHASRESNAVVISLQTTFSLASNVTLFDLADRMQKCVNSCKSSAEVCQLLGSQRRIFRAGSLCKRKSPECDKDTSICTDLDGVALCQCKSGYFQFNKMDHSCRACEDGYRLENETCMSCPFGLGGLNCGNPYQLITVVIAAAGGGLLLILGIALIVTCCRKNKNDISKLIFKSGDFQMSPYAEYPKNPRSQEWGREAIEMHENGSTKNLLQMTDVYYSPTSVRNPELERNGLYPAYTGLPGSRHSCIFPGQYNPSFISDESRRRDYF

SEQ ID NO: 144 - protein, 1894 aa, Homo sapiens
MKAMPWNWTCLLSHLLMVGMGSSTLLTRQPAPLSQKQRSFVTFRGEPAEGFNHLVVDERTGHIYLGAVNRIYKLSSDLKVLVTHETGPDEDNPKCYPPRIVQTCNEPLTTTNNVNKMLLIDYKENRLIACGSLYQGICKLLRLEDLFKLGEPYHKKEHYLSGVNESGSVFGVIVSYSNLDDKLFIATAVDGKPEYFPTISSRKLTKNSEADGMFAYVFHDEFVASMIKIPSDTFTIIPDFDIYYVYGFSSGNFVYFLTLQPEMVSPPGSTTKEQVYTSKLVRLCKEDTAFNSYVEVPIGCERSGVEYRLLQAAYLSKAGAVLGRTLGVHPDDDLLFTVFSKGQKRKMKSLDESALCIFILKQINDRIKERLQSCYRGEGTLDLAWLKVKDIPCSSALLTIDDNFCGLDMNAPLGVSDMVRGIPVFTEDRDRMTSVIAYVYKNHSLAFVGTKSGKLKKIRVDGPRGNALQYETVQVVDPGPVLRDMAFSKDHEQLYIMSERQLTRVPVESCGQYQSCGECLGSGDPHCGWCVLHNTCTRKERCERSKEPRRFASEMKQCVRLTVHPNNISVSQYNVLLVLETYNVPELSAGVNCTFEDLSEMDGLVVGNQIQCYSPAAKEVPRIITENGDHHVVQLQLKSKETGMTFASTSFVFYNCSVHNSCLSCVESPYRCHWCKYRHVCTHDPKTCSFQEGRVKLPEDCPQLLRVDKILVPVEVIKPITLKAKNLPQPQSGQRGYECILNIQGSEQRVPALRFNSSSVQCQNTSYSYEGMEINNLPVELTVVWNGHFNIDNPAQNKVHLYKCGAMRESCGLCLKADPDFACGWCQGPGQCTLRQHCPAQESQWLELSGAKSKCTNPRITEIIPVTGPREGGTKVTIRGENLGLEFRDIASHVKVAGVECSPLVDGYIPAEQIVCEMGEAKPSQHAGFVEICVAVCRPEFMARSSQLYYFMTLTLSDLKPSRGPMSGGTQVTITGTNLNAGSNVVVMFGKQPCLFHRRSPSYIVCNTTSSDEVLEMKVSVQVDRAKIHQDLVFQYVEDPTIVRIEPEWSIVSGNTPIAVWGTHLDLIQNPQIRAKHGGKEHINICEVLNATEMTCQAPALALGPDHQSDLTERPEEFGFILDNVQSLLILNKTNFTYYPNPVFEAFGPSGILELKPGTPIILKGKNLIPPVAGGNVKLNYTVLVGEKPCTVTVSDVQLLCESPNLIGRHKVMARVGGMEYSPGMVYIAPDSPLSLPAIVSIAVAGGLLIIFIVAVLIAYKRKSRESDLTLKRLQMQMDNLESRVALECKEAFAELQTDIHELTSDLDGAGIPFLDYRTYTMRVLFPGIEDHPVLRDLEVPGYRQERVEKGLKLFAQLINNKVFLLSFIRTLESQRSFSMRDRGNVASLIMTVLQSKLEYATDVLKQLLADLIDKNLESKNHPKLLLRRTESVAEKMLTNWFTFLLYKFLKECAGEPLFSLFCAIKQQMEKGPIDAITGEARYSLSEDKLIRQQIDYKTLVLSCVSPDNANSPEVPVKILNCDTITQVKEKILDAIFKNVPCSHRPKAADMDLEWRQGSGARMILQDEDITTKIENDWKRLNTLAHYQVPDGSVVALVSKQVTAYNAVNNSTVSRTSASKYENMIRYTGSPDSLRSRTPMITPDLESGVKMWHLVKNHEHGDQKEGDRGSKMVSEIYLTRLLATKGTLQKFVDDLFETIFSTAHRGSALPLAIKYMFDFLDEQADKHGIHDPHVRHTWKSNCLPLRFWVNMIKNPQFVFDIHKNSITDACLSVVAQTFMDSCSTSEHRLGKDSPSNKLLYAKDIPSYKNWVERYYSDIGKMPAISDQDMNAYLAEQSRMHMNEFNTMSALSEIFSYVGKYSEEILGPLDHDDQCGKQKLAYKLEQVITLMSLDS

SEQ ID NO: 145 - protein, 828 aa, Homo sapiens
MAGRGWGALWVCVAAATLLHAGGLARADCWLIEGDKGFVWLAICSQNQPPYEAIPQQINSTIVDLRLNENRIRSVQYASLSRFGNLTYLNLTKNEIGYIEDGAFSGQFNLQVLQLGYNRLRNLTEGMLRGLGKLEYLYLQANLIEVVMASSFWECPNIVNIDLSMNRIQQLNSGTFAGLAKLSVCELYSNPFYCSCELLGFLRWLAAFTNATQTYDRMQCESPPVYSGYYLLGQGRRGHRSILSKLQSVCTEDSYAAEVVGPPRPASGRSQPGRSPPPPPPPEPSDMPCADDECFSGDGTTPLVALPTLATQAEARPLIKVKQLTQNSATITVQLPSPFHRMYTLEHFNNSKASTVSRLTKAQEEIRLTNLFTLTNYTYCVVSTSAGLRHNHTCLTICLPRLPSPPGPVPSPSTATHYIMTILGCLFGMVLVLGAVYYCLRRRRRQEEKHKKAASAAAAGSLKKTIIELKYGPELEAPGLAPLSQGPLLGPEAVTRIPYLPAAGEVEQYKLVESADTPKASKGSYMEVRTGDPPERRDCELGRPGPDSQSSVAEISTIAKEVDKVNQIINNCIDALKSESTSFQGVKSGPVSVAEPPLVLLSEPLAAKHGFLAPGYKDAFGHSLQRHHSVEAAGPPRASTSSSGSVRSPRAFRAEAVGVHKAAAAEAKYIEKGSPAADAILTVTPAAAVLRAEAEKGRQYGEHRHSYPGSHPAEPPAPPGPPPPPPHEGLGRKASILEPLTRPRPRDLAYSQLSPQYHSLSYSSSPEYTCRASQSIWERFRLSRRRHKEEEEFMAAGHALRKKVQFAKDEDLHDILDYWKGVSAQHKS

SEQ ID NO: 146 - protein, 528 aa, Homo sapiens
MDHCGALFLCLCLLTLQNATTETWEELLSYMENMQVSRGRSSVFSSRQLHQLEQMLLNTSFPGYNLTLQTPTIQSLAFKLSCDFSGLSLTSATLKRVPQAGGQHARGQHAMQFPAELTRDACKTRPRELRLICIYFSNTHFFKDENNSSLLNNYVLGAQLSHGHVNNLRDPVNISFWHNQSLEGYTLTCVFWKEGARKQPWGGWSPEGCRTEQPSHSQVLCRCNHLTYFAVLMQLSPALVPAELLAPLTYISLVGCSISIVASLITVLLHFHFRKQSDSLTRIHMNLHASVLLLNIAFLLSPAFAMSPVPGSACTALAAALHYALLSCLTWMAIEGFNLYLLLGRVYNIYIRRYVFKLGVLGWGAPALLVLLSLSVKSSVYGPCTIPVFDSWENGTGFQNMSICWVRSPVVHSVLVMGYGGLTSLFNLVVLAWALWTLRRLRERADAPSVRACHDTVTVLGLTVLLGTTWALAFFSFGVFLLPQLFLFTILNSLYGFFLFLWFCSQRCRSEAEAKAQIEAFSSSQTTQ

SEQ ID NO: 147 - protein, 771 aa, Homo sapiens
MAPGPFSSALLSPPPAALPFLLLLWAGASRGQPCPGRCICQNVAPTLTMLCAKTGLLFVPPAIDRRVVELRLTDNFIAAVRRRDFANMTSLVHLTLSRNTIGQVAAGAFADLRALRALHLDSNRLAEVRGDQLRGLGNLRHLILGNNQIRRVESAAFDAFLSTVEDLDLSYNNLEALPWEAVGQMVNLNTLTLDHNLIDHIAEGTFVQLHKLVRLDMTSNRLHKLPPDGLFLRSQGTGPKPPTPLTVSFGGNPLHCNCELLWLRRLTREDDLETCATPEHLTDRYFWSIPEEEFLCEPPLITRQAGGRALVVEGQAVSLRCRAVGDPEPVVHWVAPDGRLLGNSSRTRVRGDGTLDVTITTLRDSGTFTCIASNAAGEATAPVEVCVVPLPLMAPPPAAPPPLTEPGSSDIATPGRPGANDSAAERRLVAAELTSNSVLIRWPAQRPVPGIRMYQVQYNSSVDDSLVYRMIPSTSQTFLVNDLAAGRAYDLCVLAVYDDGATALPATRVVGCVQFTTAGDPAPCRPLRAHFLGGTMIIAIGGVIVASVLVFIVLLMIRYKVYGDGDSRRVKGSRSLPRVSHVCSQTNGAGTGAAQAPALPAQDHYEALREVESQAAPAVAVEAKAMEAETASAEPEVVLGRSLGGSATSLCLLPSEETSGEESRAAVGPRRSRSGALEPPTSAPPTLALVPGGAAARPRPQQRYSFDGDYGALFQSHSYPRRARRTKRHRSTPHLDGAGGGAAGEDGDLGLGSARACLAFTSTEWMLESTV

SEQ ID NO: 148 - protein, 181 aa, Homo sapiens
MLLEPGRGCCALAILLAIVDIQSGGCINITSSASQEGTRLNLICTVWHKKEEAEGFVVFLCKDRSGDCSPETSLKQLRLKRDPGIDGVGEISSQLMFTISQVTPLHSGTYQCCARSQKSGIRLQGHFFSILFTETGNYTVTGLKQRQHLEFSHNEGTLSSGFLQEKVWVMLVTSLVALQAL

SEQ ID NO: 149 - protein, 438 aa, Homo sapiens
MGGCAGSRRRFSDSEGEETVPEPRLPLLDHQGAHWKNAVGFWLLGLCNNFSYVVMLSAAHDILSHKRTSGNQSHVDPGPTPIPHNSSSRFDCNSVSTAAVLLADILPTLVIKLLAPLGLHLLPYSPRVLVSGICAAGSFVLVAFSHSVGTSLCGVVFASISSGLGEVTFLSLTAFYPRAVISWWSSGTGGAGLLGALSYLGLTQAGLSPQQTLLSMLGIPALLLASYFLLLTSPEAQDPGGEEEAESAARQPLIRTEAPESKPGSSSSLSLRERWTVFKGLLWYIVPLVVVYFAEYFINQGLFELLFFWNTSLSHAQQYRWYQMLYQAGVFASRSSLRCCRIRFTWALALLQCLNLVFLLADVWFGFLPSIYLVFLIILYEGLLGGAAYVNTFHNIALETSDEHREFAMAATCISDTLGISLSGLLALPLHDFLCQLS

SEQ ID NO: 150 - protein, 294 aa, Homo sapiens
MAAGRLLLYTGLSLALCALGMLAVAICSDHWYETDARKHRDRCKAFNTRRVDPGFIYNNNNNLPLRASRSRLDRWEGKLLRARNRRQLFAMSPADECSRQYNSTNMGLWRKCHRQGFDPEIAALIRKGEIERCTYIKYHYSSATIPRNLTFNITKTIRQDEWHALHLRRMTAGFMGMAVAIILFGWIIGVLGCCWDRGLMQYVAGLLFLMGGTFCIISLCTCVAGINFELSRYPRYLYGLPDDISHGYGWSMFCAWGGLGLTLISGFFCTLAPSVQPVPRTNYPKSRPENGTVC

SEQ ID NO: 151 - protein, 437 aa, Homo sapiens
MGLRAAPSSAAAAAAEVEQRRSPGLCPPPLELLLLLLFSLGLLHAGDCQQPAQCRIQKCTTDFVSLTSHLNSAVDGFDSEFCKALRAYAGCTQRTSKACRGNLVYHSAVLGISDLMSQRNCSKDGPTSSTNPEVTHDPCNYHSHAGAREHRRGDQNPPSYLFCGLFGDPHLRTFKDNFQTCKVEGAWPLIDNNYLSVQVTNVPVVPGSSATATNKITIIFKAHHECTDQKVYQAVTDDLPAAFVDGTTSGGDSDAKSLRIVERESGHYVEMHARYIGTTVFVRQVGRYLTLAIRMPEDLAMSYEESQDLQLCVNGCPLSERIDDGQGQVSAILGHSLPRTSLVQAWPGYTLETANTQCHEKMPVKDIYFQSCVFDLLTTGDANFTAAAHSALEDVEALHPRKERWHIFPSSGNGTPRGGSDLSVSLGLTCLILIVFL

SEQ ID NO: 152 - protein, 971 aa, Homo sapiens
MATVRASLRGALLLLLAVAGVAEVAGGLAPGSAGALCCNHSKDNQMCRDVCEQIFSSKSESRLKHLLQRAPDYCPETMVEIWNCMNSSLPGVFKKSDGWVGLGCCELAIALECRQACKQASSKNDISKVCRKEYENALFSCISRNEMGSVCCSYAGHHTNCREYCQAIFRTDSSPGPSQIKAVENYCASISPQLIHCVNNYTQSYPMRNPTDSLYCCDRAEDHACQNACKRILMSKKTEMEIVDGLIEGCKTQPLPQDPLWQCFLESSQSVHPGVTVHPPPSTGLDGAKLHCCSKANTSTCRELCTKLYSMSWGNTQSWQEFDRFCEYNPVEVSMLTCLADVREPCQLGCRNLTYCTNFNNRPTELFRSCNAQSDQGAMNDMKLWEKGSIKMPFINIPVLDIKKCQPEMWKAIACSLQIKPCHSKSRGSIICKSDCVEILKKCGDQNKFPEDHTAESICELLSPTDDLKNCIPLDTYLRPSTLGNIVEEVTHPCNPNPCPANELCEVNRKGCPSGDPCLPYFCVQGCKLGEASDFIVRQGTLIQVPSSAGEVGCYKICSCGQSGLLENCMEMHCIDLQKSCIVGGKRKSHGTSFSIDCNVCSCFAGNLVCSTRLCLSEHSSEDDRRTFTGLPCNCADQFVPVCGQNGRTYPSACIARCVGLQDHQFEFGSCMSKDPCNPNPCQKNQRCIPKPQVCLTTFDKFGCSQYECVPRQLACDQVQDPVCDTDHMEHNNLCTLYQRGKSLSYKGPCQPFCRATEPVCGHNGETYSSVCAAYSDRVAVDYYGDCQAVGVLSEHSSVAECASVKCPSLLAAGCKPIIPPGACCPLCAGMLRVLFDKEKLDTIAKVTNKKPITVLEILQKIRMHVSVPQCDVFGYFSIESEIVILIIPVDHYPKALQIEACNKEAEKIESLINSDSPTLASHVPLSALIISQVQVSSSVPSAGVRARPSCHSLLLPLSLGLALHLLWTYN

SEQ ID NO: 153 - protein, 454 aa, Homo sapiens
MTWRAAASTCAALLILLWALTTEGDLKVEMMAGGTQITPLNDNVTIFCNIFYSQPLNITSMGITWFWKSLTFDKEVKVFEFFGDHQEAFRPGAIVSPWRLKSGDASLRLPGIQLEEAGEYRCEVVVTPLKAQGTVQLEVVASPASRLLLDQVGMKENEDKYMCESSGFYPEAINITWEKQTQKFPHPIEISEDVITGPTIKNMDGTFNVTSCLKLNSSQEDPGTVYQCVVRHASLHTPLRSNFTLTAARHSLSETEKTDNFSIHWWPISFIGVGLVLLIVLIPWKKICNKSSSAYTPLKCILKHWNSFDTQTLKKEHLIFFCTRAWPSYQLQDGEAWPPEGSVNINTIQQLDVFCRQEGKWSEVPYVQAFFALRDNPDLCQCCRIDPALLTVTSGKSIDDNSTKSEKQTPREHSDAVPDAPILPVSPIWEPPPATTSTTPVLSSQPPTLLLPLQ

SEQ ID NO: 154 - protein, 314 aa, Homo sapiens
MGARGALLLALLLARAGLRKPESQEAAPLSGPCGRRVITSRIVGGEDAELGRWPWQGSLRLWDSHVCGVSLLSHRWALTAAHCFETYSDLSDPSGWMVQFGQLTSMPSFWSLQAYYTRYFVSNIYLSPRYLGNSPYDIALVKLSAPVTYTKHIQPICLQASTFEFENRTDCWVTGWGYIKEDEALPSPHTLQEVQVAIINNSMCNHLFLKYSFRKDIFGDMVCAGNAQGGKDACFGDSGGPLACNKNGLWYQIGVVSWGVGCGRPNRPGVYTNISHHFEWIQKLMAQSGMSQPDPSWPLLFFPLLWALPLLGPV

SEQ ID NO: 155 - protein, 244 aa, Homo sapiens
MAAAASPAILPRLAILPYLLFDWSGTGRADAHSLWYNFTIIHLPRHGQQWCEVQSQVDQKNFLSYDCGSDKVLSMGHLEEQLYATDAWGKQLEMLREVGQRLRLELADTELEDFTPSGPLTLQVRMSCECEADGYIRGSWQFSFDGRKFLLFDSNNRKWTVVHAGARRMKEKWEKDSGLTTFFKMVSMRDCKSWLRDFLMHRKKRLEPTAPPTMAPGLAQPKAIATTLSPWSFLIILCFILPGI

SEQ ID NO: 156 - DNA, 6603 bp, Homo sapiens
agacttcacggacaaagtcccttggaaccagagtaagtgtcacttgtcttttctgtcttatctgttactgtggagggcagtgttgttcaaagacatgcatgcagctaggggctcctcaaaggtagggggaattctttgagtaggctgggcaaatgtctaagtagcccatggatgcatctccaaggcaattaatactgtagcaatactgagaatggtggatttataaagctgggtgctcagatgaaatataggcttttttgctaaaaaggaagcttacttgaaggattggcttttggttactgattaagaaagtcagtcagtactaagggacaaaaggtgttttctgtggaaacctattcaataagaaattacttggcggggcgcagtggctcacggctgtaatcccagcactttgggagaccgaggcaggtggatcatgaggtcaagagatggagacaatcctggccatatggtgaaaccctgtctctactaaaaataaaaattagccgggcatggtggcgcatgcctgtagtcccagctactcaagaggctgaggcaggagaatcactcgaatccgggaggtggaggttgcagtgagctgagattgcaccactacactccagcctggcgacagagcaagagtctgtctgaaaaaaaaaaaaaaattgcttgccaaattcccccatgtaaaggaaaaccaaacatggtgtatgaagaaattatagcaagagggaaatattagctagaaaaatcttggcagatgcaaggatgatttgatactgaacctatctcttaagaagactagaaccaaggatcctcaaaattggcactgctatctttggaagaggtaggctttcactcacccaaaggcaaggagctggccaggtgatcttggggggcatctgttctgctctactaacaaagacacaggtcaggattttgttctgaagatagaggggcatggtggctccgtataggtatctacttcataggtggtcttggtgggtcccagatttcaaagaagagatggaaactcccaaaagtttgcacaacctggcaccaggctatgtgccactcactgatcctttagttcccgcaccgagcagtgggacagtgctggactgttcagaatgtggggcctgggcagtgatgtgctggtaaatgttcaacaactgactcttctgaagaaaagatccctgctttataacatttgttgattttcatggtataaatgcccccactgtggtcagtttcaagctaccaacatgctgaatgtggagtggggaagagatgcacgcaattggcatttataaaccagtataagccagccagcgcaccataggcctgggtgtctttcaccatcacagactgctctatctctgctcagagacttcaccaactcccaggctggaggacactagcagtggagggtccaggatccagggctatagctgaccactgtgcagtggccttgaggcagacttctgcagtagactacagcagggctggcagattagatgacaacatggtcctttggtttctcttctcgggccccaccccagatcacctccctttaggaacagcatgccttggagtggttgcctggggcttaacaagttggggaaataacaaatgggttggaggtagggggtgtatggaggtgactcggtttaaaatgccacctgacaatgttgactcaacttgcctttgcctttgccaaaccttcccagaaactggactcatgggatcaggcttgcactagctgctctttgtgctttccaagctatttgcatacttccactgttaacctgccagcccaccgaaaagtgctgactatcaaaccgaactgtctgccctcatcagcaatggctgtggctgcagaaattagaaactgccaacacagctttgttagtgaccgttagcctgactctctccagaaagagggctgattggatctctctggagatggaggagtgggccaggggatgggtttgataaaaaattaaagctcctcacttctcaccctaatagagtatctccctttccagccagggtgccctataccctccatgtgccttaatttcctttacaatggctattgaaaaaaatgtgaattgtgtaagcaggaaacattccttaaggagagtagaaggaagaacaccagagacccaggtttaagatagaaattataaagtaggtgccacctactttactgattggcatttgggtcaaatcaatttagattggcggcaatagattgacaatttcaaatgtcattcacatggaagggaccatcattgtccaccgttatcaagaaaaatcactttctagattaactacaaagaaatttggcaggggggtgggagacagggtataccagccagccagggacatcctggacattggtgcctgggatgtgctggtggtgtcaggcctcagggaagggctcctgcagtgaaggagttctctcagggaaggtccccaagaaaagtgccctggcctggctcttgccaggccctcaataaggggcctggctgttgccaggtggtggtggtgggagggtgatggtagcacttttctcatacattacctcacagtagccttgcaagataagagttgctttcccacattacagatgaggaatgaagctcagagaggtaaaataatttatccaaagtcacaaagctcgtaggttacaccaaagccaatgctccatttggggaggcatctttaataagcaactggaaaggattcaagtgccaaaaaagcagggactgggagaagtcctacaaaggcaacctacagagtgattcttttttgtttcatttttgtttgctttaaggcatccgtgggtaaaaatatctaagagcttatctcagcagaattcagctagtcactgtgtaacatcacctcatagctccagaccattctgaactcttcctcccctgatgcccagttttctctttttctgaccaggttacctcccccttctctgcctgcactttcctctccttcaggaggtctgcaaagtgaccttagatctacctgtgccacctaaggactgtgcaatgtgggtcaggctcagcccactctggtgccctcagtgtcctcatctccaaaataatggggttgacctactaggatttcactatggcaacaccactggtgtttggggtagaatgatctctgcactgtaggacatccttggccctgcctaccaaatgacggtagcatcccccagttttggtgacaacaacaacaaatgcccacacatttccaagtgccccaagggtactaggtcactctcggctgagaatcttcttagaccaaaagccatgaatatctgtttgtatctttctctgagccaggaccattttccttctcagagtcctcctgtgggctccacagtgcaaagctactgctcggggacagcagcaggaaagcgtagtggtgtcagggccgggcatgagaatgatgcacagctgggttggagctccaggtctgttctcacaagaggtgtgtccttgaacatgtttcctaaccactctgaacctctgtttcatcacctcttaaataagaacaacaatgggacccctccagggctctttaaccctaagtccagtgcctaggccatgggggtgcttaggaagtgttggttatgaatagtatggtaaggtctccctctggctttccacccattgaacttatcccttacaaaactctttgctgaaatgattgaattaatgatttgtgcactcatttacttattgcttccactccctgttagactaagattcctagaaggcagagaggatctgggtctctctaacactccattttgtccccagggcatggtacacagaaggcactcaataaacatttatggagtggctgaaaaaatgttacctctcccttgtctttactgtccagtgcccactgcctttagtagcagagtaaagacaaatcttttttttttttttaacctgtaggagaagccgggatggaaactccaaacaccacagaggactatgacacgaccacagagtttgactatggggatgcaactccgtgccagaaggtgaacgagagggcctttggggcccaactgctgccccctctgtactccttggtatttgtcattggcctggttggaaacatcctggtggtcctggtccttgtgcaatacaagaggctaaaaaacatgaccagcatctacctcctgaacctggccatttctgacctgctcttcctgttcacgcttcccttctggatcgactacaagttgaaggatgactgggtttttggtgatgccatgtgtaagatcctctctgggttttattacacaggcttgtacagcgagatctttttcatcatcctgctgacgattgacaggtacctggccatcgtccacgccgtgtttgccttgcgggcacggaccgtcacttttggtgtcatcaccagcatcatcatttgggccctggccatcttggcttccatgccaggcttatacttttccaagacccaatgggaattcactcaccacacctgcagccttcactttcctcacgaaagcctacgagagtggaagctgtttcaggctctgaaactgaacctctttgggctggtattgcctttgttggtcatgatcatctgctacacagggattataaagattctgctaagacgaccaaatgagaagaaatccaaagctgtccgtttgatttttgtcatcatgatcatcttttttctcttttggaccccctacaatttgactatacttatttctgttttccaagacttcctgttcacccatgagtgtgagcagagcagacatttggacctggctgtgcaagtgacggaggtgatcgcctacacgcactgctgtgtcaacccagtgatctacgccttcgttggtgagaggttccggaagtacctgcggcagttgttccacaggcgtgtggctgtgcacctggttaaatggctccccttcctctccgtggacaggctggagagggtcagctccacatctccctccacaggggagcatgaactctctgctgggttctgactcagaccataggaggccaacccaaaataagcaggcgtgacctgccaggcacactgagccagcagcctggctctcccagccaggttctgactcttggcacagcatggagtcacagccacttgggatagagagggaatgtaatggtggcctggggcttctgaggcttctggggcttcagtcttttccatgaacttctcccctggtagaaagaagatgaatgagcaaaaccaaatattccagagactgggactaagtgtaccagagaagggcttggactcaagcaagatttcagatttgtgaccattagcatttgtcaacaaagtcacccacttcccactattgcttgcacaaaccaattaaacccagtagtggtgactgtgggctccattcaaagtgagctcctaagccatgggagacactgatgtatgaggaatttctgttcttccatcacctccccccccccgccaccctcccactgccaaagaacttggaaatagtgatttccacagtgactccactctgagtcccagagccaatcagtagccagcatctgcctccccttcactcccaccgcaggatttgggctcttggaatcctggggaacatagaactcatgacggaagagttgagacctaacgagaaatagaaatggggaactactgctggcagtggaactaagaaagcccttaggaagaatttttatatccactaaaatcaaacaattcagggagtgggctaagcacgggccatatgaataacatggtgtgcttcttaaaatagccataaaggggagggactcatcatttccatttacccttcttttctgactatttttcagaatctctcttcttttcaagttgggtgatatgttggtagattctaatggctttattgcagcgattaataacaggcaaaaggaagcagggttggtttcccttctttttgttcttcatctaagccttctggttttatgggtcagagttccgactgccatcttggacttgtcagcaaaaaaaaaaaataataataataataaggcctgctgtgtaagctgacagtatttgtagctgatagggggttgggaggaaagtgtctactaggagggtggggtgagattctgtgttgatgtaggaggccgagaaggcccttaactcaaagtagcttatttatccaaaatgttctggatgcatcatctccaaccaaggaccccttatttatcatgcctttgttctcttttccctcagatgtatatttctttaaaaataattttcctaataacaaaacttatttctaaaacagcttaaaaattcaaagaaaaaccccaaacactgacattacctacacttccactacccaaagacaaaatgtgcccactgtgtgcttttgagtgtattttcttttagtttgttttttgttgggtgcatatttatgataataacaatgatggacttcaattgtactcactgttctattgttggttttaattagcagcaagttgtgatcactttcccaggtgaataaatcatttcaaagca

SEQ ID NO: 157 - DNA, 6232 bp, Homo sapiens
gcgtgcgcgtgcgcagggataagagagcggtctggacagcgcgtggccggcgccgctgtggggacagcatgagcggcggttggatggcgcaggttggagcgtggcgaacaggggctctgggcctggcgctgctgctgctgctcggcctcggactaggcctggaggccgccgcgagcccgctttccaccccgacctctgcccaggccgcaggtgagtgacgccccgcagcgcgggctcccacccctcgcgaggcttcgccccgccgccgcgcaccgacaacgcctagtcactggctgcaccgcacgtcagttcatgacactcccccagcacgtggacttggacttcatcgcttgtgggaaggcgcgcactggtgctaggaagaccccatgctgggggaggggaggagggtgtctccacctgcctttaacggttttgctccggccctgcacaccgtctccacacctgctgtgccctgtcgtcccccattgtcacctccaagccgcccttcataccagcgtggtcaggaaagctcttagcaggctcagattgtccgaccgctaatcacgcaggacgggtcacctggtgcctctcgcacctttgccttccaaaccctcgcgcccaggccttgtgaccgttccgcaaccgtccctgccctcccagtctctcctcctttgtcctccatccttagagaacgcgaggtctctcccccccatgctactgcaggctctcgcagagactggggtcacaagttgaatatacccccgtggacgtgttcgccctggcctaagaggtattggtggccagtggggacgggctccctctctgatacccctagaggcagctggagggttggagtggcctccctgtgcactcaggcactcccaacttgcagccctgggctcaggctcacacactttcccagctcctttgtgcattccgcacttctaggtccctggactcatcccaaagtccctgacattcacgttaaatgttcctgggtttttttttgtttgtttttttttaaggaggcagcgttcacgttaaccaagtacaaaagtttttgtttttttttttttgagtctccctctgtcgccctggctggagtgcagtgcaatgttggctcactgcaccctccgcctcccgggtttaagcaattctcatgcctcagcctcccgagtagcttgggactacaggcaccgtcaccatgcccggctaatttttgtatttttagtagagatggggtttcaccatgttggccagactggtctcgaactcctgacctcaagtgttctgtccgcctcagcctcccaaagtgctgggattacaggacaaaactctatacacagtctcttttttctcaggatgttgaggtagggattcccagcataccccgtttacaggtgaggaaactgaggccaggagagaaagtcactggtcactgtaactcctgtcaggcttacaccctatgaggcggggactgctgtgctctactgtccactttgcagagggatacacactcccgcagtccagcgaagggaggtcagaggtgtcagggctgtggaagtctgcgcctgggtggagagccacacctggaggctgccagatctcccgggggcggggaaggaagcaggcaccggtttgtccacagctcttctgggatccatagagctcagggaccctgtggcaagtaggtgcaattaggcctgaaggccgaggaggggctggcagtggggagtggggggttggaggctcatggctggtgggtaaaggtggaagaggttaaaggccttggcagagtgaagctaagccagggtggcggatttgccacctcccctggccgcacccaggaggaagccgtaaaggccactcccttcctctgtcccttggcccaggttgcgggcccctccgtgcccctccaggtcggcaagcagctgagcttccctgctcagaatctaggacagccgggatcttctctggacccagcttggacccttatgtgacctgtgtccacttataatcaggcactgccctgggtttaggcggccaggtcacagccctgacctccacagaatgtccagtctgtgggtggacaggcatgaccagggctttaaggacagttgttagacatgggaggcagtgcttcctaggtctccaagagggacatgagaaccctcccaggaaatcagctgagatctgaaaattgaggggaaaacacagggtgtagggaggagagagggaaaggcaagtctctggtgtcctaatggaccttggggcctggggcctggggctctggtgaggagctgacacatttaggatggggagagtgataggtctgggaggaattcaggaggcggggcaacaggacttggtgactgagcagattttctacccagtgcctcagtttcccacccactgcctcagtttcccttttgctacgcagaggagatagaccctccctgctgacctgagcccgggagcctgacccagggcatgtggaaaaatggcccgtccctcagtctctttaaccactgagtttggaggtctccctggcagatcatctcgctatgaggagcctggtgaagactctgggatcagcgagacctgagttcgaagcccaactccgctaccagctcttttttttttcttttttgtggtgacggagtctcgttctgtcgcccaggctggagtgcagcagtatgatttcggttcattgcaacctccatctcccaggtttaagcgattctcatgcttcagcctcccgagtagctggcattacaggcgtgcactaccacgcccggctaatttttgtatttttaacagagacggggtttccatgtaggccaggctggtctcgaactcgtgacctcaagtgatccacctgcctcggcctgccaaagtgctgagattacaggcgtgagccactgcacccagcctctgccaccagctgtatggcctcctcttggttcctttctctgtaacctggggagtgcagtagcacctgcccagtggggctcttgagcccaggaactgctacactctgaaccccactcgtactaggggctcagtaacaagcagccgccagtgtggttcctatatcccgggacttcgcctgtctcctgcggatcacagccagtgactactgtgctcttggagaaaggtccagcctccagcttcccaggcttcatttgcatccatctcgcaggccccagctcaggctcgtgcccacccaccaagttccagtgccgcaccagtggcttatgcgtgcccctcacctggcgctgcgacagggacttggactgcagcgatggcagcgatgaggaggagtgcagtgagtggccacgccccttggcggggcttacagggggcggggcctgagggtggtttgtcaggggccaggcacgcggaggtggagcttgtgggaaaggcagggccgcagggatgggtgcgacttgggtctgtgggtcataagaagcggggtctaagatgggcttgggctgggcgcagtggctcacgcctgcaatcccagcactttgggaggctagggtgggaggatcgatcacttgatcctgggaggttgccgctgcagtgagctaggattgtgccagtgcactccagcctgggcaacagagtaagactgtctcaggaaaaaaaaagaaaaagaaaaaaaaaagaaaaatgaaagaaaggaaagaaaggaaggaaagagagagggagggagccaggtacggtggctcacacatgtaatcccagcactttgggaggccaaggcaggcggatcacttgaggtcaggcgttcgagaccagcctggccaacacagtgaaaccccatctctactaaaaatacaaaagttagctggatgtggcggcaggcccctgtaatcccagctagtcaggaggctaaggcaggagaatcacttgaccctgggaggcagaggtttcagtgagtcgagattgcgccactgcactgcagcctgggcagcaaagggagaccccgtctcaaaagaaaaaataaagaaagaaacaaacaaacaaatagaataaagtgggcttgtaggaaggtagagctagtggggtctcaggggaagagcttgcagggaggcctgtccttagaaagtggagttaacagttgcagggggcggagccttaggaagggagcatttttttgggctcagctgttcttagagggtggggcttgcaggggatggggtttcagggagtacctgggccttcttgggtgggcatttgggacctgaccaaccctgtgccccagggattgagccatgtacccagaaagggcaatgcccaccgccccctggcctcccctgcccctgcaccggcgtcagtgactgctctgggggaactgacaagaaactgcgcaactgcagccgcctggcctgcctagcaggcgagctccgttgcacgctgagcgatgactgcattccactcacgtggcgctgcgacggccacccagactgtcccgactccagcgacgagctcggctgtggtatgcacctgcggggctggggtggactcgtgggtagatggggacacccactgcctgctggggcgtggccaggctgggggcgtggacacatgcctttgcccgtgcctgcatccctgtgggggaatcaagacatcattaggggccgggcccggtggctcacgcctgtaatcccagcactttgggaggctgaggtgggcggatcatctgaggtcaggatttcgagacctgcctggcaaacactgcgaaaccccgtctctactaaaagtacaaaaaaatttgctgggcatggtggcacacacctgtaatccgagctactcaggaggctgagtcaggagaaccgcttgaacctgggaggcagaggttgcagtgagctgagattgggccactgcacaccagtctgggtgacagcaaaactctgtctcaaaaaaatttaaaaaaggccgggcacggtggctaacgcctgtaatcctagcactttgggaggccgaggcaggcagatcacctgaggtgaggtgttcgagaccagtctggccaacatggcgaaatcctgtctctactaaaaatacaaaagttagctaggcgtggtggcgtgcacctgtaatcccagctactcgggaggctaagacaggataattgtttgaactcaggaggcagaggtttcactgagccaatattgcgccactgcactccagcctgggtggcagagccagactccctctccaaaaaaaaaaaaaaaaaaagacataattacgggcagtcagcttcacccagcctggttggttgaggataaaccccaagggctcccctgggcatctggccccctcacgccttcagtgctctctcctcaactactgaacgcctgggcttattgcaggaaccaatgagatcctcccggaaggggatgccacaaccatggggccccctgtgaccctggagagtgtcacctctctcaggaatgccacaaccatggggccccctgtgaccctggagagtgtcccctctgtcgggaatgccacatcctcctctgccggagaccagtctggaagcccaactgcctatggggttattgcagctgctggtaagagggacttaccctcccatgctgggggcttagagctccggggattcaggggaggtgggtggggagggatgagctgcagaactcccatccccatgtgtatggagcttggtgggtgtgggggctcttgccttccccctccttactcctctgtccatctgttccccacagcggtgctcagtgcaagcctggtcaccgccaccctcctccttttgtcctggctccgagcccaggagcgcctccgcccactggggttactggtggccatgaaggagtccctgctgctgtcagaacagaagacctcgctgccctgaggacaagcacttgccaccaccgtcactcagccctgggcgtagccggacaggaggagagcagtgatgcggatgggtacccgggcacaccagccctcagagacctgagctcttctggccacgtggaacctcgaacccgagctcctgcagaagtggccctggagattgagggtccctggacactccctatggagatccggggagctaggatggggaacctgccacagccagaactgaggggctggccccaggcagctcccagggggtagaacggccctgtgcttaagacactcctgctgccccgtctgagggtggcaattaaagttgcttcacatcctc

SEQ ID NO: 158 - DNA, 24505 bp, Homo sapiens
ataacaacttatgtgaaagtcaaaaaggcatatgcttgacaccttgactgtgtgattcacaccacgctcattaagcttgcctacattaggagctgcatgcagaaccaaaggctgtgtgaagacaaggtagtgaaggggtttcccatatgaaaaatacagaaagaattatttgaatactagcaaatacacaacttgatatttctagagaacccaggcacagtcttggagacattactcctgagagactgcagctgatggaagatgagccccaacttctaaaaatgtatcactaccgggattgagatacaaacagcatttaggaaggtagccacattcacattttcagagcccaaagcaaaatatgacactaagctcttcttcccttttctgattcttgcaggtctcatctgagtagcagcttcctgccctccttcttggagataagtcgggcttttggtgagacagactttcccaaccctctgcccggccggtgcccatgcttctgtggctgctgctgctgatcctgagtgagtagatgggctataatggggccacggcctcagttcctaaaggtgaccagggaaaaactcaaggagcttctatctctgcttctacttggggttcagagacagatagcaagggatgggaagtgagcagagctgggttccctggacaaccaagaggctccaaatgcaaccatcagagcaagccagatatcctgaccttggtttctcacccactgcttttctcacctcataggaaacttggatttttccttctgccaaaccacaactctatatcccaccctccctcttaagcctcagactaaataatttttcagatgagcagttacttctaaaaacctaggcacgtgaaggaaggtttactgagaaacatcactgttttctagaagttttaagccaaaatttaatcagagattgaaaaagtgaggggaacaataggagcccaaggaacgaaaggaggataaaccatttctgtaagtccttgtctgcctctgcactcagagaagagaaggagagaataaagtgtgccgtggccaagtaaataatagcagagatgaggtcaggccttggacataagccatcacgtttgtaaaatacattatatgacattttctttgttgtttaggggctctggatgatataaaaagggagcaaagaaatgataaggaaaaacaaaagaagtggttgtggttaggttgttagaaaatgtttcggagagtgtctgattgtcattttctgctccctcacagctcctggaagagaacaatcaggtaagtttctccttctctctgcccctctggtctctggatattggtcccctcagcccacacagcctgccctaacccttgcaggcacgcatcccatcagcaatgctaatgctctggggtcacatctgctactatattgggtgaacagagcctcctccgactttttcagtctctaggtttttttttttttttctccctacattaccggtattcctcagactacaggaaggaaacacttgcagagcaaaggacagaggcaagaggctgatgatgaaggaatctcatatgtgatctccatattctctagtacatctccctctgaatgtccaagctagtgctgctatcaaaggacatagaaatagatcccatccacggaggaagatgctacagcagaatccttataaatctccaaaaagagctcatgccactgccacacctcacttccatgcctgtcagtcagttgcaattccatacacaagtctgacttctcaggcaacccatcctcctccatttaaattctttatatccctccattgtttactgtgtccaacttaaatggagagtaaagttgccttccccatagactttcaaagctaagagagatataaaagtaatacaagtgagaaaatcttattcattttaagtgttaacaagtaggaagtaattttctggagtctagaaactacttctgaggtatatacatcccaggttcacctttatctggacagaaatgtataggacaagagaatttcaggatcagccacattctgaggccttcgcagtttttgcccaatggcaaatcacatctcctgagcttttctgaggctatgccaggaaactgagacctctcccctataatacccttctgcccacctccaggaaatggatgaggaagaacagattctttcccaggcatttccctaggttatttctgctcaattttccaccctggtcctgactggaaattagtccaggaaaactcctgactgtaggttgggctccccatgtgctgtgcccacctcccattgaccttcccctgccttcatctttctatttcctgtttaggggtggccccaaaagctgtacttctcctcaatcctccatggtccacagccttcaaaggagaaaaagtggctctcatatgcagcagcatatcacattccctagcccagggagacacatattggtatcacgatgagaagttgttgaaaataaaacatgacaagatccaaattacagagcctggaaattaccaatgtaagacccgaggatcctccctcagtgatgccgtgcatgtggaattttcacctggtgaggaatggaaggggagtgtctaaagtcaagccaccaggcagaatgcctgagggccgggttaatgcagggatcctaggcagagttgtaagcagacatggggattgatgcactgaccccagtggggaaaataaagagatagggcagcagcatgatgctggattgtctatccatctacctccaaagaattgtgggtgacccaggggccatcaggcaaaaaggggttcaagtctgggattcctcttttgtgaaaagacatgtgaagatttctcaagaacattttctgggaattggttcacccttgtagggcaaggaagaatcaggtatttggggccacatggcaatgtgggtgggggccatttgcaggtgtgtatagaactgtggctcttgcctcatgggtggaaatgaaagtgaaggcagaaacagcaggggataacctgagtgtgctcctgtgctctttgcagactggctgatcctgcaggctttacatcctgtctttgaaggagacaatgtcattctgagatgtcaggggaaagacaacaaaaacactcatcaaaaggtttactacaaggatggaaaacagcttcctaatagttataatttagagaagatcacagtgaattcagtctccagggataatagcaaatatcattgtactgcttataggaagttttacatacttgacattgaagtaacttcaaaacccctaaatatccaagttcaaggtaatggctagattcctgtggattactgggtttgttagggaaactggggataaagggaagatgtttatcagtgggaatttcataaagagtctcctatggctcagccatgggagggagatggttccttctgcatgcttctctatctcctgatggctggtgctgagatgacaaatgcatctctctaggaactctgagcctcaccaccctggagactatgttgtttcttttcattagagctgtttctacatcctgtgctgagagccagctcttccacgcccatagaggggagtcccatgaccctgacctgtgagacccagctctctccacagaggccagatgtccagctgcaattctccctcttcagagatagccagaccctcggattgggctggagcaggtcccccagactccagatccctgccatgtggactgaagactcagggtcttactggtgtgaggtggagacagtgactcacagcatcaaaaaaaggagcctgagatctcagatacgtgtacagagtgagtgtctaaggggctgctcttccagagtcagagctggggagaggaaggccagtgatatctcctgcacccctaggatggtggacataacagagaggagtgtccagctattctggtaatcttctctctttaagctcaacgttggtctaacagccctagaacattttcttccacttgagtcaggtaatagtaattattgatcagttactgattgcccaaccctatggggttacagagatgtacaagatcggttctctcatgaatcaagagacaactagaagcacaactgaacacatgcagttttaagaggcccctgtggtgcttccatttggtaacctgaactcacaacaaaatagtccgaaaaggggaagatgaatatgaactgtaatagtcagagaaagacatggagacatggatgtaaatctggagaagtcttgaagaataggagaagggtttggattctattttgatcttcaaaacagaggatctccagtgttctcttttattttgtggtttattgatgcatcaaagattccttagagataaatgcatataaaatgtgaccagaaaacattggatttatggagattatggacttggtgcccacatttctcaaggatgggaatgttgtgggagtgagagggatgttgcttcctttataatcgtatacacaattaatttcttatttcctactttgggcttctgcctgctgcacctgctgctattggcctattcatggtagctccagccttccccttgaccttgatgtccctgccatcaggaccttcacatgccatcttgtgttcccccaggagtccctgtgtctaatgtgaatctagagatccggcccaccggagggcagctgattgaaggagaaaatatggtccttatttgctcagtagcccagggttcagggactgtcacattctcctggcacaaagaaggaagagtaagaagcctgggtagaaagacccagcgttccctgttggcagagctgcatgttctcaccgtgaaggagagtgatgcagggagatactactgtgcagctgataacgttcacagccccatcctcagcacgtggattcgagtcaccgtgagaagtaagttccgattcctttcacacagcctcgagttgcaagccagggtttaggttctctgtcagccactaaggtctcctaaaagaggcacggggagggagggaggggaggggggtggggacagagagagagagagggggagagagagagagagagatatttaaaagctatccaagaaatggaaagatggcaaaataagttgaagcaccttacttcttgcggggaagactgagtggtgatgaaaacaaaactacccaagattacctctcactgttttggggaaatgcttctgattgttagataagaaaaatgtgatcagtggggaaacagaaacaatcaagggacaagggacatatccattgctaggctccttgagagaggttgtgcatctgtcacaacgtcagaatcctctgacagcccttttgtctccttcagttccggtatctcaccctgtcctcaccttcagggctcccagggcccacactgtggtgggggacctgctggagcttcactgtgagtccctgagaggctctcccccgatcctgtaccgattttatcatgaggatgtcaccctggggaacagctcagccccctctggaggaggagcctccttcaacctctctctgactgcagaacattctggaaactactcctgtgatgcagacaatggcctgggggcccagcacagtcatggagtgagtctcagggtcacaggtaagcaagatatacccacagcagttaacagccaatacaacagatcatgtcttctcagaaatagctccactgggctatttgctggttgatatcccaatagacttcccactctttctgactccacctgggagttctgggattcttcctagtgattacacatttagtaacttagaccattcctttttttaattcctctgtaattatcatcaacagccatccatataccccattcatttttttttctggtagaggcacgaaggcttaccagaataccaaacacgtgatgggtcagcaattactgacaaaggaaaatggcacagaaagcctttatttctgaattcctttgcccaggaaaaaaatgactggatcatcccttgccacagttttctgcccctatctcaatctaaattcccacttggctccctggatcattaaagtgtctctcttcatggatacccacttctgtgggttctctgtcagccactaggatcacagcagcaggcctctttcatggcctccagattctagtgacctatctaaccttctcacttttttcaaatgccttctgattgggtctcatttaatctgatgttctcagtatcccctaacaaaattttccttcagcagaggcaccagggcatctcgtatttcccatgtccagcccctaagaacaattagcaatgtgcccaatcatttagaagagaacctccagtccaagtcatggttatcccaaagggctcagcatttggaggatgggagagggcactgggacctaggagaagatggcaaaataagagagatatggtaataattcccagtcacacaaacccatacattctctggattttgccatggactcttgttctccaatgattccagactattagaacacttatgacattttggttaataataatccttcctataggccaaacttgggtaatgatttaaggaggtattaaaatctgggaatgccagacagtgtgctgaaacagagactcgagtcttgaacaagaaaatatcatttgtttaaccttgaataagtcttcttactagtcttgtgcttattttcctcccttataaagtaattgagtcagcaaatcatgggggtataagaattctggatctcgcaccactctccatcaaaagtatttaacacataccccacatatatgtatattaataacatatatttgtgtgttaattatatacatgtactactgtattaacttaatgggcacattacaaaacaaacagaaaaaatagaaattaaataaggggccgggtgcagtggctcatgcctgtaatcctagcattttgggaggccgaggtgggcaaatcacttgagcttaggagtttgagaccagcgtgggcaatatggagaaacccctgtctctacaaaaaaatacaaaattcagttgggcatggtggcatgcgcctgtactctcagatacttgggaggctgaggtgggaggaccacttgaacccaagaggttgagactgcagtgagccaagattgcacaactgcactccagcctgggcaacagagtgataccatgtcaacgaaaggaagaaagaaagaaagagagagagagagagagaaaggaaggaaggaagggaggaaggaaggaaggaaggaaggagagaaagaaaatgaaataaacaatattttaaaatctttgatttagaatatttgactaaaattattataattgaatatgcttcatttactttgaaaatcttagtttacttatggtggtacaattatttgaggtttggttctgagtttggccttattcctattagttttagtgtctgttactgcttaaagctttatcttaccaatatatctacatccaagtggaagcagatcatcactgctgctctttcaattccatgatactcatttttcaatcccatagtctaactatgcaagggttttcattgaaatttggttaataagtttatgtttttgttgatgttcattagttgttcttgtaaagtaagtaggaagtgctgcatgttgaatttcctttttttttttttttttttttgagatggagtcttactctgttgccctggctggagtgcagttgcactatctcagctcactgcaacctccacctcccaggttcaagcgattcttctgcctcagcctctccagtagctaggattacagaggcaggctaccacgccctgcaaattttgtatttttagtagagacgggttttcgtcatgttgcccaggctggtctcgaacttctgagctcagggaatctacccgcgacagcctcccaaagtgctagaattacaggcatgagccaccacgcccagccactgcatgttgaatttctatcgaacatgtttaaactttggttgccatgttctgtttccatggatttttaaaggtgcagatataaatttttaaagttgacatacttacattttctggtaataagacgacatagaaatgtaaatatttttaaacaactattttccaaaatattatctccatagcataagtttagaaaagcattagcaatatgaaatactgttaaaagtcactttttaaagtgtttgctaagtattaacattgtcagtagccactgatcaccaaaaagtcaacaaaaattaaatactaatctttcttcatggaaaaacacgtaacgtatctttacatttaattcctctttttagaactttgccacaaaataagtgaactttcatgtgatacaaaaaggtttgaggtcactccccaatctcattacaaagcattgtaaatcttttatgatttggccaggcacagtggctcatgcctgtaatcccagcactttgggaggccaaggaaggattgcttgagcccaagagtttagaccagcctgggcaacatggggaaaccctgtctttactaaaaatacaaaagaatagcaaggcgtggtggcatgatccggtaatcccagctactctggaggctgaagaagcaggatcacttgagcccaggaggtcaaggcttcagtgagtcatgattgcaccactgtactccaggctgggcaacagagtgagaccctgtctcaaaaaaacaaaaaaagaatacagaaattaaattaaaaaataaaaaatatattttatgatttaaattaaaataatctgtaaaaacacttaagtagccaattaaaagggcattatgttccatatgctgagagttaactaacaagccaaggcactgctgtcccaccctccgtgcctgggtggccctgccttcataaaaaacgctgtcctatcccaatacacagtgtgacatctacctgagcaagagcaccaccatgaatattagtaaagctgaatatctttttaaatttcaagctcaaaaagaaatactcttaaatgttctcatattttcttcttacacttcaatctggtgtcttatagcccatcttggagaccacttaagttgacaataaccatggtctttttcagtcttcaagttctttgattttaggggaatatgcattcagaaccagaggtcccatgagccctagaggaggggatgcaagaggttggaaatctctctttccagaatacgaacacccagagacatgagtgaaaggcacagtgagatcacaaagcaccatacaaaagactcacccctgaggccctctgcatcccgcccaggtcacttcatatttagaggctatacagaagggacaaattcaaaccatctgtttcaatttagcaggaactctacacttccaatatcaggacttggcacctctatcctgatgaggcagctggtgctatctttcttgcagccagcagatggctcattttcaagtttaatcattgccattcagtgaatagtttccacattcacactcattccctttagcccatctgcgatggaaagcagagcttaagatccttatcaagttacccttgccaataaagcacacggcttatatctaaagcactacacacagattggttcatccagttttcctcacaactttgcagaaccagcaatcttacagttaacattcgatattaagggctttctattcttcccactatgccatttctttaattgttcattaaaatagaaatcattgttgctagagctatatctggattttttttgacagtttggttcacttcagttttccattcaatcatcaattattgagcataaattttatatgccaggcaaagttccaacagctataaatacagcaacgaacaaacagataattctccatcctattggggaatcatataaaacaatgatgatagatagatacatacatacatacatacatacatacatacatacatagacagatgtcaggtagtgctaaatgctatgtagaaaaataaagcaaggtgattaggtagagagtaatgggtcctgcctttagataggtatggaagtctcagtcttagagctaagattcaggtgtaggaattttagaaaccttgattttagctatatttttatcaataataataaccaatttttatagtactttacatgcaatatgatttttattacaatagcttgagatataatgtatcattaactcagttttacagaggaataaactaagacttagagaaattaaaaagttcttaaaaaatcaagcttatagagctaataaaggatagagacaggattgaagcccaggttctccagaatccaggtgcatgttcccgcaactcaactatgctgcatattcctttattaagttctcttgtatacctacttaagtaaaactgccagtgaactatttttcctccctcagttccggtgtctcgccccgtcctcaccctcagggctcccggggcccaggctgtggtgggggacctgctggagcttcactgtgagtccctgagaggctccttcccgatcctgtactggttttatcacgaggatgacaccttggggaacatctcggcccactctggaggaggggcatccttcaacctctctctgactacagaacattctggaaactactcatgtgaggctgacaatggcctgggggcccagcacagtaaagtggtgacactcaatgttacaggtgtgttaatagtacctgggctagaggtcacagttatggtaaataaaatagttatctgacagattgtacaaattctactagcaccaaggaggttttgaacatgcacacgaaggcttgggacttctggagattggtactgattttatatgggagagggaaaggaaatacattttaatcttagatgctggagaatacctttcatatgccatagttttgaaaattacaaatgatgctacaggaggaatcagaaactggaacacactcaccctacttgcatgattttgtctgtatccaaaacctgtgccactgaaactcaagtacagctccctccactcaggaacttccaggaacagaacaggccttaccgctgcgggaatcacggggctggtgctcagcatcctcgtccttgctgctgctgctgctctgctgcattacgccagggcccgaaggaaaccaggtgggtgtctaggtcctaccttgtgatgtgattttgccgttgctataataatttgaagttgtctggtgcaccctataaaggtcaagtattcccttccaagtactaggccctcagttccactactcactgtcactctgtaggcaattgtagcaaaaacaatagaataaacttctcaataaaatttttacctcatgtgtttaatttgagatttatattaggtagcagagttttgcttccaattaaaaattagaaaattaattaactcatgttctatctccctaagaaagtccttcatttgtaacaaaaaataaataaatcatcatagaggtgaccataaactccgagatatatttgaatgccagctaaatgtagtgaaattggataaaataaataaagaatgccaaaaatgagattaaaaattcaatttccgattgttgctagtgtatagaaacacaactaattttaatattaattttatatcctgaaatcttgctagactgacttattagttcagtatctcttttgcagatttcatcagatgttctatatagatgatcatgttgtctgcaaagaaagatagtttaactctttcctttccaatattaatttcttttacttcttgttcttgcttaattgcactggttagaacctcctgtacaatgctgagtgcaagtggtgagagaaaatattcttatcacattccagatcttagggggaaagtattcaatctctccccattacagattactttagccatgggtttttttcaatgctgtttatctggtggaggaagtccctcctattcctaatttgctgagagattttacacaaataaatttttgtaaaatgatttttctacatttattgagatagtaatgagattttttttagtctattgataaggtgaattttgaatgtcgaagtagccttatatttctggggtcaacccaacttggtcatgactgttgatttgatttgctaaaattttgcaaaggatgtttacgtccatgtttatgaggaaaatttgttgttagctttcatttctagaaatgtctttttatgatttggtctcaaaggaatacttactcagttaccacttccagaatttttcattcctttttatatagccatattttcacctggtatcaattttgttctgcctgaaggaccttttttttttttttaacatttcttacagtatgactgcctgccagtgaatttgattgataatgtttctcaattcctctatatccttactgattttttgtctacctgatctatcaattactgagataggggaattaaaatctttaactgtaattgtgaatttatccatttcttctgcaattctatcaagttttgcttccagaatttggaattgctcattattaggtggataagtgttaagaattttcatgtttttgatgaattatccactttatccttatgaaatgaccctctgtatccctggttgaatcacttactgtgaaacagtctttgtctaatattaatatgttaatataattagtgttagcatgtgatttttttccatccttttgcttttagcctatttgtacccctatatttaaagttaatttttaatagatagcatgcagctaattcttgccggttttgtttagtttaatattgtagtctgcctttaaaatgaggtgtttagaccatttgcactagtgtaattattgatatgattaggtttcatgtctattttgctatttgctttctatttgtcacatctattttttgctttactttgacttatttttggaataattgattttttaattctattttacttcctttgttagtataatagccataactttttaaaaattttcaacttttattttagatgtaaggggtaaatgtgtggattggttacatggttatattgcatgatattgagatttggggtacagatcctgtcacccagatagtaagcatagtacccaataggtagtttttcaactcacacattcctccccatctcccccatctagtagtccacagtgtctgttgttcccatgtttatgtccatgtttgctcaatgtttaggtcccacttataagtgagaacatgtggtatttggttttctgttcttgtgttagttggtttatgattatggcctccagttaaatctatgttgctgcaaaagacatgatttcatttttttatgtctgcgtagtattccatggtgtatatgtaccacattttctttatccagtctaccactggtgggcacctagattgataccatatctttgctattgtgaatagtatggcaatgaacatatgagtgcatgtgtctttttgacagaatgatttatttttttgtgagcgtataccaataacagaattactaggttgaatggtagctctattataagttctttgagaaatctccaaacccctttccacagtggttaaactaacttaaattcccaccaacagtgtataagcattcccttttctcctcagcctcaccagcacctattgttttctgacttttaagtaatagccattctgactggtgtgagatagtatctgatggtggttttgatttccatttctctggagattagtgatgttgagcatttttttatgtttgttggctgcttgcttgacttcttttgagaagtggctgttcatgtccttcacttatattttaatggggttatttggtttttgcttgttgatttgtttaagttccttacaggtctcaacattagacttctgtcagatgcatagtttcctaatattttctcccattctataggttgcctgtttactctgttgataatttcttttgccgtgcagaagctctttagtttaattaagtcacacttgtcaatttttgtttttgttgcaattgctttgggaacttagccaaaaattcttggccaaagctgatgtcaaggattgtatttcctaggttttcctctaggaattttatagtttggagtcctacatttaaatctttgatccatcctgaattaagttttgtatatggtgaaaagtaggggtctagtttcagttttctgaatatggctagcaagttatcccagcaccatttattgaatagacagtcatttccccattgcttctttttgttagccttggcaaagatcagatggttgtaggtgtgaatctttatttctgagttttctattccattccgttggtctatgtgtctgtttttgtatcagtactatactattttgattactgtaggcttatagtatagtttgaagttgtgaggtgtgatgccttcagctttgctgtctttgcttaggaatgctttggctatttgggctcttttttggttccatatgaattttaaaatagatttttctaattctgtgaagaatgatattggtaatttgataggaataatattgaatctgtaaatttctttgggcagtatggccattttaacaatattaattcttccaatctatgagcatgcaatatttttccatttatttgtgttgtctttatttcagcatttttttttttaatttctcgcagagatctttcacctcctttgttagctgtattcctaggtatttcattttctttgtggctattcaaaatggaattgtaccattgatttaactctttgcctgactttgttgatgtatagaaatgctactggtttttgtaccttaattttgtgtcctgaaaccttactcttggcagagtcttgagggctttcaagttagagagtcatgcagtcagtgaaaagagaaagtgtgacttatttagctatttgggtgctttttatttctttctcttgcctggttgctctggctaggaatttcaggactatcttgaataggcgtagtgatagtggacatgcatagttgtgtccctttttcattaattaaaaaaaatttttttatttatgcattaatttttatctttacccaggagttattcaggagtaagttgtctaatttccatgtatttgttagttttgagagatcttcttgatatttatttctatttttattgcactgtagtctaagagtgtacttggtatgattttttaaaaaaatttattgatatctgctttatggcccagcatatggctgatcctaggatatgttccacatgcaggtgagaagaatgtatattccatagttgccggatagaatattctgtagatgtgtgttaggtctatttggtcaagtgtcaagtttctttgtcagttttctgacaaagtccagagtttctttgtcagttttctgcctcgatgatctgtctaactctgtcagtgggatattgaaatctcccactattattgtgtgactgtccaggtttttttgtagatcaagaggaacttgttttatgattctgggtgctgcaatgttgggtgcatatatatttagaatagttaagttttcttgttggaagcaataattatttgttttgttactctggtgattgctttagggcttatagtatacatcttcaacttattgctgttttcaagtgaaattatattacttatagaaggctagtcacacctcctacttccaaaattacttttctttttttcctctcattgtttatctgggatgccattttctaatctataacatactaaaagaagacatttgaatctcagtgttgaggttgtcagtcagcacagcaccaggagagaaaactgacaatcatttcacatgatccatgtgaacagaagcccaggtggtctgtcccccagacttaggggaagtgttattttaaataacaaactcactaaggaattaggacagttcaccaagcagagggtctgtgctcttcttttctcaaaatcttgcttattgtacctcctcatagcaaagtctcccttctcaccattgacaagacttctcaggaagaagctcagaccttctacatttttctaaaagttaagggctctgctccttgcctgagtgaatcactcctaaaaggaatgataggttttttgactctatagtaaatctggctgtgttgaaattccagtaacaaaacttgccaacttgatattgggcaaataagttaaactcactaaactcagtttcttcatctatgaagtggttataataataacagtatctaccttttaggtactatgacacaacctaggtaaactgcttagcaccgtgctggcccatatgtcttcaaggaatattagcttgtataataaatagccacctgtctaggtctcagttttctcttttacagataaggagatagactgactcccagatgcattctaggtcggagctaaccacccacagaaaagatactggttattgactgatgtggattgtgattgctctgaggagattcaggaccagatcctgatcatacccctctagcttaactcaggagtcccactccctgaggaacagggagttactcagttatttttcatgagagtcaaggctggtatgtttattttgagcaacgacttgcattctctaagccaatgagaccgattagagccacagattttaaaaaggcaaaggacaaggatgggaacctggataaggcttgtattggggcaagcctgaaagattcaatatttcggtgatgacggaaacttgccatatttttaagtctgatagatttggcttcaaggatagacttctaacaggcaatctccttttagaaaattgtcaatttgttatttttaagtcctcaaagtaaatactttgttcagttgtttaacacatctttgttgaatatttttaactgctaagcatgatattaggaatacaaaaaaatttaagatgaggtttacagcctcaagtagcacaccctttcatgaaagagagaaatagaggcaaatagaaataaataattacgaaacaatatagtaattttaatattacatggtcttatgtgcatggagacagtttacttaatccagcctgttggcatcagggacagctctggaagaaagataaatcggagctagccaagtgaaagagaaggagagaagaggtgtggaaaagccattacatacccacatgatttgcagttcagtgttgctggaatagacttgcaggggtgaggggtcacagttagagaaagagaaggtagagcttatcatggtagtcccattgattcatattagtgaaggaattctgtatccattttgagcatcccttggcccctctaggcctcagtctccttgtctccactttgtagggctgcagtcaggatgaagaagtgggtttgaggggagcacctgacccaggttgtgacctactcagtcacaactacttagagttgctattcacctattactgattgaaaaatgattcagaatgagtgtgactctgggcaaatgcctttcaagaccccaccttcctgacctataacataacatagggggagtaaggagggtggagctggataatccttgagtttttccgtagcttagatctagaatgaatctgatttctaggaaaaaatgttctaacagagagttcattatttacacagctcacttaccaccaaccttcctttgtttgttttgcaggaggactttctgccactggaacatctaggtgaggtctctgcttcttgtgctgccaacattttcatgatttatttatatgcacgagacttgtttatgtttttttttaaatttcaatggatttcctagtagcatttttacgttcttacaaaataaaaaagtagatataagtgaatgtcactttcacttatatttgtgaacgatattcactgtctctacttaaacacaatacatgttattggctatctatgttaatttatctacttccttaaatgtgttccagcagagacttgaccactaatgtcttaatggcattacctttcatagggctacagtgcattcatttccttcttcctcattcttccactcatttgggaaattattattgaatgctggcaatgttcaattcacaatattaactgcagaaggaaatgaaattggaaaaaaatccactttacttgaagagctcgcatggcatcttgcaggaaaggtagattattgtaatatgaggtgtaaaactgaaagggaccttttaaaaaagacaaggtttaagttctgtaagaatgcagaggtctttgtgtatcagtgtttaatcatttacatcttcaaaaataacatttaaaattagtcaaatatgagtttttgcctttcaaagaggccctgaggctgctggccctctggccttgccttggctgtcctgttttgtaatgcttccctgggcttcaccttgtgccataagtcttctgatactttattaataaatggtgctgggaaaactggctaaccatatgtagaaagctgaaactggatcccttccttacaccttatacaaaaattaattcaagatggattaaagacttaaatgttagacctaaaaccataaaaaccctagaagaaaacctaggcaataccattcaggacataggcatgggcaaggacttcgtgtctaaaacaccaaaagcaatggcaacaaaagccaaaattgacaaatgggatctaattaaactaaagagcttctgcacagcaaaagaaattaccatcagagtgaacaggcaacccacaaaatgggagaaaattttcgcaacctactcatctgacaaacggctaatatccggaatctacgatgaactcaaacaaatttacaagaaaaaaacaaacaaccccatcaaaaagtgggcaaaggatatgaacagacacttctcaaaagaagacatttatgcagccaaaaaacacatgaaaaaatgctcatcatcactggccatcagagaaatgcaaatcaaaaccacaatgagataccatctcacaccagttagaatggcgatcattaaaaagtcaggaaacaacaggtgctggagaagatgtggagaaataggaacacttttacactgttggtgggactgtaaactagttcaaccattgtggaagtcagtgtggcgattcctcagggatctagaagtagaaataccatttgacccagccatcccattactgagtatatacccaaaggattataaatcatcctgctataaagacacatgcatacatatgtttattgtggcactattcacaatagcaaagacttggaaccaacccaaatgtccaacaacaatagactggattaagaaaatgtggcacatatacaccatggaatactatgcagctgtaaaaaatgatgagttcatgtcctttgtaggaacatggatgaaactggaaaccatcattctcagcaaactatcgcaagaacaaaaaaccaaacaccgcatgttctcactcataggtgggaattgaataatgagaacacatggacacaggaaggggaacatcacactctggggactgttttggggtggggggaggggagagggatagcattaggagatatacctaattctaaatgacgagttaatgggtgcaggacaccagcatggcacatatatacatatgtaacaaacctgcacattgtgcagatgtaccctaaaacttaaagtataataataataaaattaaaaaaaaagacccaagcagaagcagacacaatatttttacttgaatcatgctggactggaggacttccagaatattgatttccctgaaattctgtgtaacccacagatactttttaatccattctctccccctctgtcacagtcacagtcctagtgagtgtcaggagccttcctcgtccaggccttccaggatagaccctcaagagcccactcactctaaaccactagccccaatggagctggagccaatgtacagcaatggtgaggactccctagggggcagaaggctctagggaggagccagggagggaagagggattgagcgacagcccatggccctgtcacaaatttaaaaatgacattcctagcattacactgggaatagaagttggttatgaatttggtgattgggaagtagagtctagaatatgagctcttgactgcaaccaactatgatatcttctctcacagtaaatcctggagatagcaacccgatttattcccagatctggagcatccagcatacaaaagaaaactcaggtaagatgcctttcaggcaaatagaggtgaggtggcagtgttttattgaaacgggcaaggggtctttgatcagagttatttcaaatacaagcccaacacgcaaggcattacttgcctcccatagtgtcagctgtagaatctatccatttcttcttacctttacatactgccaccatgatcccataaattctttgaggacagacactgtgactttttcactaatgtattcacagcatttagctcaatgcttggaaaactgtaggccccctaaaatattgtttgaattaatgagtgaataatcaaatgtggagacaattgtcattcttttaactggtctctttatttctactactgttctcctccagccttcccaaaatctatttccagcatgatccctttgaggtgctctattgttcacatcagtgcctagattaactgccctcaatgacacccattccaaagcatgatctttgccttctgcacgctggctcctcctgcaagctttgcctaatgttcttcctctagccatactgaactcttggcacctttatgcttggtgctcatgtttcttactggtcttgaaatgtcctttcctctagtctacttggtgacccctactcatatttcaagacatagatcaggtaacagtgaaactcacactgatgccaactaccctttccatattctaatctgggaggagacatttattctttatggtaacaacatagttcaatatgtatttctgtcttggtgcccataatgcttgttgcatttatttctatgtccatttctccccttcaaaattataggattcttgatcacatgaactgagtttctgtcattttttttttttttttttttttttttttttgtgagatggggtctcgttctgtcgcccaggctggagtgcagcagtgcgatcttggctcatttcaacttctgcctcctgggttcaagggattctcctgccttagcttcctaagtagccgggattacaggcatgcatcaccatgcccagctaaattttgtatttttagtagagacagggtttcactatgttgtccaggagtttctgtcatttctatctccttataccttacctaatgcctaatagaaggcattgcttattggctgcacaaataaataaaagagatacaaacagccccttggaaaggtagaaaacatacacacacactaaattttctcaatgctccaatgcaactctttggcttcctgggaaattgtcatgtggccttagaatgccaatctcctctctggtctcttccaatttccctgtgcaagtgaagtgactcatatctgcctccttctcccagaggatcaatacagccatagaagtctgcagtggattgggggtgggtgcccctctggggttataatgagcagaggagcaagaaggaaattgtcatgaaaatagttctgggcatttggtgggcagaggaaagtctttattagtgtttgtgcttggggcagtactttttctatttgggtttggaagaatccaacagaggaaacagtcaagagatcaagcaaatcaagaagattggcttggagtactttttctatgtgggtttggaagaatccagcagaggaaacagcaagagatcaagcaaatcaagaagattggtttggaatgcagtgtgcgtacgttgtaagttggaatatattgcccacagtttaatacttttctttgctactcctacccaacagctaattgtccaatgatgcatcaagagcatgaggtgagtcacatttcttggctttctttcctctctggccttcctctcctgtatttaggtacttaccttttgtgtttttttctaccaggaacttacagtcctctattcagaactgaagaagacacacccagacgactctgcaggggaggctagcagcagaggcagggcccatgaagaagatgatgaagaaaactatgagaatgtaccacgtgtattactggcctcagaccactagccccttacccagagtggcccacaggaaacagcctgcaccatttttttttctgttctctccaaccacacatcatccatctctccagactctgcctcctacgaggctgggctgcagggtatgtgaggctgagcaaaaggtctgcaaatctcccctgtgcctgatctgtgtgttccccaggaagagagcaggcagcctctgagcaagcactgtgttattttcacagtggagacacgtggcaaggcaggagggccctcagctcctagggctgtcgaatagaggaggagagagaaatggtctagccagggttacaagggcacaatcatgaccatttgatccaagtgtgatcgaaagctgttaatgtgctctctgtataaacaatttgctccaaatattttgtttcccttttttgtgtggctggtagtggcattgctgatgttttggtgtatatgctgtatccttgctaccatattgggaacagccaaaagaagttatagaacaagaatttaaggtgactctatctgaagtgtatttttgtacttacagggtgacattcccaaccaaattaccctagttatgatgaaaaataacttcagcatttcattaaagactctgctagtttaatatgtgacttgtatccccactgcaaagaccttatgtgtgaagaatcacattaattgtaatttttgcttcatgacatagtctcatcatttgccatacatgatagatttctagtcagtcagttttattcttataagcacccattaaccccgagacaataacctactatatctatgtggcttctcccattctcttcctctacctcactccatctgataaaaaaccattctaaatctcatgttcattattcccatgctctcctatttctatcatattaatgtatctacatgttttccttaaatatgtttttatattagttttaactataagttaaagaccatattgttgtagataattttttttagtactttctcttcatgttgtatttctaagattcatccatattgttgcgtgttgctatagttcatttgtttttattgctgtttagtatttacttgtgtaaaatatctggcttaatgttttcctagctatcaccatcaaaaactctttccacagtgtgttgaatttttaatatgacaaaaatgaaaatgtaccaacaattttcagtgacttcacctccattctgaaatcctgatgtttccaaatatctctgaacacctcaagtcctagggacaactgagattatattaacattaatctctgaatgttgccaattctaggccttcacttggttcatgtaggaacaccaagtccctttcaaagcaccacatcttcctctaatcaatatttcttggagtccctagggaatgtcttacatgcattcaaacaatcaccatttctggagatacactacagggtcaccataaactctgctacccttaggttccatcactatggaagctgagtttcaccagaaggcacttttgtcctccattacgaccagcaaagccagctaagccacagctgctggcctcaaaaaatgtgatgatcaatccacactgctcccactggcctctgttacccttatcctggcctttgagtgcagggcatgatgtcctgcccgtactgagatgctgatctctgccagttcatgttcatattggcattaaaattttaaggtcccttgaagagggaggaggcaaatgtctctgtcttctatgtgatacattctgctgtttttttctctatggtgaaaatatgtaaaccggttttgggtaccaaccaccaggctgtatatggaggctctcctcctttctaaccctgctgctgatttggaattaccttgccaagcccctttgtgccttatagtgaactttctctaagggacctgtcatctcttatcattgtttatccattttctagattctgaacccaagaaagaacaaagttcaagattttccatgtctttgtaacacttagccctgtgcaaatcagagtatgtgagtggaagaaggggtgagtcctaactgtacatctcggatataacaaatgtgcaaattctgattgattgccctgtaaaatgaattattctcatgcagtgctctacttgacttttatctttgaattcacaactaaaaacccatagcccagaaatctaaaaaaagtaattttagtggagcctttgaaaataaaagaccattggaaaaagta

SEQ ID NO: 159 - DNA, 22868 bp, Homo sapiens
aaggattttccctctttaaaaattttccttaacactagtaatcatgcagtctttcactcaacaaatactaattgagtgccaagtaaagatgtcagctctacggagcttacattttagaaggagaagaaaacaaatatcaaggtgtatattatagtgtacagcaaggtgaaaagtgccatgaaaaaacagtagggcggggtaaggaggaggagaaggtgtgttgcaatttaaaatttttaacaaaagttcatgatactcagagaattgaaacaggtgagatcattagacattcgcatgtttgagcacaagcgctgaaggacttagcaatgtggctgcagtggaataggagagatgcaaaataacagacaaacccagagaggtaagagagcagacctcttcatgagaggctgcctgataaactgatttgacactgaattgctgagaaggtaatgcaaatagtttttttctccaagaacaaagtagttcttggtcaagccgatttgatttgggctgtgggaatctgcacaaaccatttcactagctaagtctcaggttcctcaaatgaaaaagcagggactggaaatggcttttgaagtctcattctcttctaaaaatgtcaggctccaagacaaccaggtgaagtccaagagttagtaaaataaggattgtggctcggctgtggcctaatgcaaacttgcacaaccccaggaaaccgaaaaaaactggaagaagaattgcagaatggggtgccaggttgaaagaccttaacctttgcactcaaattcctcccacacccagaagtccaggtcccgaccgcacgacgccgtgctcactgctgggtgctgcgcctgagtccgcctcctgcggcttcccggacttgaccccgcccacgccctggtcccgcctcctgccgacgccggcacagaccccggtgacggaagtgacgtaaggccggggctggagggcagtgctgggctggtcccgcaggcgctcggggttggagccagcgaccgtcggtagcagcatggctctcctctttctcctaccccttgtcatgcagggtgtgagcagggctgagatgggcaccgcggatctggggccgtcctcaggtaccgtcgttcgcggcagggctgcggccgggtcgggacgagagggagggagggatccgccccagccgggaagccccgccccgcttctccgaggtcgccctagcccgggacccctgcgtcgggccctgagcgggcgacggggacgcgaggtggggtcgcgagactggggctccgtggtttgaactcgtcggttgcctttctcctgcctcttccctggttgccgccacaacaaatcacgccgcttgtttttccgactcttgtaatccacttttaaatacgattatgcgctgcagaaggacgttgctggtcaatgtgggacagcgtggtctcaaagattataatatcgtcttcttactgtacctttttttatggttagatacgcagatactcactagtatgctacggttgcctgcagtgttcagtgcagtgacaggctgtacaggttcatgacctaagagcagtaggctgtgtcatctgggtttgtctgggtttctactgcccgaagaaattgcctaaggggacatttctccatttctcagaacggatctccatcgttaagtgacgcatgactgtgagtgtcctgatcagcatgtggcatcgtggtctcagttcgtggcttaaatacttctttcttagcgggggtggggggggggactcaaagtgcttagggtaggaaagtatgcattatgtcgccagctgagaagtaagtggcagctgagaagtaagtggcagtccgtcttaggtctcagtctggaagtggtggattgccggcactcactagcagatttggcagtaggtctcttcgtacgggtttgttcttcggagcattttatttccacctgcttattgacatttcctagaaaacaaatgttgagggtggcttttctgaagtgcagagtaattgtgattacgagctccagagaaaacagtaaaccttttcaattcagttttcttttttttattatgatttatgattcatagggactttgaaaggtccacgttttggttctgtgttcacaacaatcttctggagtaggcgttatttgtctctctctttatggacgagaaattgagttacggagaggcctgcccaactggcagagaggtcatagccactcagtggggagctgctcaatttggctccagagtccaagttcttaactgctcttctaggctctagtcagtcatccacatgggcagttgcagtactttgcggtaagagcttgcacttaggcacagactagtggaaagcaaggcggggtgcttgtctcttttagggaagtcagtgaagacttcacaaaggtgaccccagtgttggaaccagaggtgcagagactgaggtgcagaggtgtgatagcatgttgaattcgtggaatattaagcgttctattgtaaagtgtgtgtgagagcttacaaggggaggagataggttaggtggagaagtaggaaccaaataatgaattgccatattatgtgtaccagcaagaaacctagctttattaacttaagcaaaaagaggaatttattgtctcagaaaaaccagagttaaacagaaaattatagatgccagctgggtctcaagaggctagaaccaggaacccaaactgctaggactctccatttcttatttctgtctgggtattgacagctttccacacttggcaggaatcatggatgctgacagcttctgagttttgacatcttgcagcctcctccattctaacaaaatgccagggaaaggctctgatttgcccagctaggttcaggtgccagcttgcatgggaaggacattctcgtagagggttgggttgggttaccagaagaagcggaatggcgtgcctgaagtacaggtgttgagccaacaaaataatacacccactatgccttgctgaagtcagtcattatttactaatgctgacatcattggattatcaattacaaagggaaatgattttatgcaggatcagacatgccatttagaaagaccagtcatcttataaaatagtttgagggtaaacacaaggcccattaggaggctgctgcttaagttggagtcgataagtagtttaagtggagaagaggacagttagcagaacatttagaaggaagagttagtaggcctctgactggatgtcagcagagaaagaggataacgctagcgcaggcatagcgttaaagcaagtgccaggcccttccttctgaatacggggccctatgagtgcaccgtgtgacccctgtgagtgcacaatttgcacgtccttgtagcttgctctgggaggaggattgcctgtctgcctcccgtgggaagatcaactgcagccttctatattctgcagaaacttttgaatttgtctctgtacctctcgttctaaaactggggtcacttttgtgaagcctttcctgactcccctagaagagacaagcaccccggccttgcttttcattagtttcagtgagccctctttttaaagtgcatttctaacacatttctctagatttttcagtgcatttctctagattttgttgtgttccctgttcttttaaagttaatttaaaacacaaaatctccaaagtaggaagaaaccaacaatgctctggctcttgcttagcttcccagccttattcttactgttgctgggcttgactctatagttgaagttcatcttagatgagaggacctggtaagaacagggaagcagacaagtgaatatggtgatatagtcagtctccaggaaatccaggtgtttaggaatgtattgtgttacattcatgggctttcattaatacttcttaagtgaaaataaaatctgtgtgtgccacttaatcagtagtatttcactcttcatgcacttttacacataaaagtagtatatatttttaagtgaatcagggtgtgccactggctttcttcatccagatgagtgtcccactctgagtaatagctgaagagctaggctggacttcacaccaactggaaggctcttcactgaccttgtacagtttatcagctatgcttcctactaattatctgactttaggataaagctctgagtactgtttaaatttttcactatttctttggattctatagttatttcagagattcaaaatacacaggataatactttttaattatatttattgaatagggtattaaattttctttttcattttattctgattcataattcacacagactttgaaaggaccatattttggttctatctaaaagaaaacctaggctgggggcagtggctcatgcctgtaatcccagcacatcggcggaaggatcactggagcccagaagttcaagaccagcctgggcaacatggcaaaacccatctctacaaaaaaatacaaaaattaaccctgtgtggtggcatgtgcctgtagtcctagctactggggaggctgaggtaggaggatcacttgagcccaggaggtctaggctgcagtgagccatgattgtaccactgcactccagcttgggcaacagagcaagactctgtctctcgtgtttgtgtgtgtgtttgtgtgtgtgtgtgtgtttgtgtatgaaaacctaaagaaaagtaataaacagctatcttacaaaatttggcagcataccagtagtgaagttgctttacaaaccagatgagtaattaatggttcaattttgattgaacaaagaatcagaatgaggtttgaaccagaatgaagtgaattcctaacagaaaggaatttacttgtaattttcttattaaaggggtgcctttattttagattatcctaatgcatagtaatcagaatactaggtatctgtttaggtcttgtgtatttttaagaaattattcattttaatgcattgttcaacttttgcagtggccataatataattgtgataatgtaataaaatcaggaaacattacctgaagcagatgcttttgaagtcaccagaaaatagtcttctccaattccaatttaaatatggaggtaatttaccccttattttattaaacgatcacaaagatgttggaagcatttttcttaatgaaaaccaacaaaactttgcatattgtcaagttacgtaacttctctaagcctttgttttctcattggtaaaatatgtatggtaacattgtctccctcacgggatggatgtgatgagtatctgaggtaatgcattaaaaaggtaagcacactgtgtgtcttgtagtaaatacttaatatgttagggattattcaataatgtgcattattattttaacaaatatatctttaaatattaaattcccttagtcatatgtgagaaattgtgttggcttttaaaaaaacaaacttaaccagatcagtatgagaaacttaaaacaggctcagcagctaactcattcttccatctcttccaacagacaaaaaagtttggttttttagtagactggaaaggcctgcattgttttttcatttcctcaactgtttttcaattcagaatgagttagtccaaaagagaattagtgttgagaaatgacttctctcagggactagattggtctggtccagtcagaactaatgccagaccaaacccaactagatgaaattggataaataggagtaagaataaagccctggatttcaagtcagaaaagtggctgagcagatatttattggataagccccaacttggtggtggtgcgagggaaaaatataggggaggttagttacttacaagttcactgcaggccactatgtgttatgcctggctctttaaaaagaaaaatttcaattagaagatttcaatgaacacttgaaacatcacctgcaagaattatcaaaatgtctgtactcagcttaaacctgggggatgcggctccttgctacggtgaaagttggaaagcattaagaaaaatagtcattttatcaccactggaagccattcgggagggagattgtaatcaaatatgttctgacaaaaatacaaaggccttgatttggtacttttcatttattcagtgtggatttcttatgctggttctgtttgctgtgcagatgaaacctttgtgacagtccccattcctgtccctgtatctttaacatggggaaggtgttagatcttctctgagagttgttcttaaggaaaagatccagatgctttaatttgaaacatttgtttttgagttgtagtgtcagatgacttagaatccagaacaacagtttacttcatcctcacttccttatgcttctcagcgtgctcttcccatgaagaggttggtgagcaggttgtcagatgatttctgcagagtccatagccctgttccaccatagatgtacaaaccttttatacagtctttttacactagtgtgttaagatgggtgatgaactcctcgggctgtccttttttaaagagacacagatgcttttggtggttacaggatggactcaggtagcagccctggttcctgtcacccagctatgcagaggaaatggccagtgtcttcagactatactctgcaggtatctgtagtttgccatccaccctacattcaccaacatttattgcagagctatcacgactgctattttttggtcctttgtgacattgttatggtcccgtcgatagcactgctctgtatcacctgctgatcttcactggtcttttgtgttgtctctcttttttcatatcctgtctcttctggcttatcagctttctgaggaaacagttggctttaaccagggccctcctttttttttctgcattgtaattaaagtgttaggaaaaacaaattcttctctcctgtgtttagttttcttaaattatcagctgtgagttgtaggggagttctgggaattagatcttaaaatagctaaagtttactccggatagtatgcagatgtaatacactaaataattctgagtccatttccaaaagcaacatgagttacacaaaactatcttggcattttcaagagatgggaaaatctgtaagattatcttatttcatgaaatcactctggtaagatcttttcttaagccccagagataataatactcttttgctgtttctacatatatttttatttacatagtgtaaatgtattagaagttaattgtaagccttaattaatttaatctgaatatataacaatttaaacctcacattacaaaattctgaagcttaagaaaactgcttatgtctgtcatattattttggcaaataatatttggcaaaaaataatatttggcaaaacaaaggcagatgtctaataaccacacagtttctcctctggtagcattaaaaaccacagattacatcttttggtgtaaatttataagtttttcttttaacctagtagtaatttctttttgctataaaccattgaaatattttcctcctaccacctgtctgtcttgctttgaaagctatgatttaagtccttgtcctagtctaaccatatcaggcttttacttaaattataggaaacatactttgattcacgttaaaaactaatctaatgctgcacaagcctactcctgtttgtagttttccattgtgtgattcagtagccccttcctaagtacaaatgcactttgtttgatattctagtatgcagattgacttctatatgcctttttctcacaggaatttcaggttgagcgtataccattataaagccattcctactgggtataattaaaaagagagccttaggctgggcccggtggctcacacctgtaatctcagcactttgggaggcccaggtgggcgattcatgaggttgggagtttgagaccagcctgaccaacatggtgaaaccccatctctactaaaaatacaaaaattagccatgtctggtggtgcaaacctgtaatctcagctactcgggaggctgaggcaggagaatcgtttgaacccaggaggcagaggttgcagtgagcagagatcatgccattgcactccaacctgggcaacagagcaagactctgtctcaaaaggaggggagtggagcttaaaaggaagcaaaggatttccagtcttggaaacctagaggaaggggggtccttgctatgtagtggcagaaagctgagtgacactgtagccttcagtgacaccaaaagtagagaatgtctgaggagctgtgtgatctagctcaggaggtttctaaccagagtgctgaaagtgccacctggtttcttcttgcgtcttatagtaacaggtgagactttgctcaatcatgggaagaactgttaaaaagaaaccaggaccacctggtttgaaaattctcagcctctcgagaggcaaaaaaatgccaaaatgaagaaatggtctccgaaggaaggctcagatttagtatgagttttcttagcatcaagtacctctgttttccggttgaaaaagtatatttatatgtgtgattgttatttgatattaatgttgattgaacccaggtgaagaggaatgacttttatttctacctaaaatatggattgtgaagtatttgagttgtttcaggaggttgagatgcaaacgtgtgatagaaaaaagaccctcttaaggaagcctcagtatcccctgctatgaatggccatgggaactctacaaaaaacaaagagccaaggctactctggcaagaacagtgccttagggatcacctacaaggaagttgcttagagaaccagagatggcaggtaccaagagccttcagctgcgcctctggaagcagaaggagaaaacctaggtgtctggtcactggccacaaaaaggtcaagttagtagtatgaagtatttgaatcttcagaccctccccagcttgataatctcaaccttttggcccaaattattacaccattttggtaaataatatagaagttagatcttttggcaataaccaaatctattcatttgtttgaggggagccatgaaatatacaggtttactgtaaagcattctgtttttaagttagtttttcctcaactttttttttaaagaacacttaaattgtaaacataaagcagggtttctcaaccttggcactgctggcatttggggctatattattttttgttgtggaggctgtctgatgcattgtaggatatttagcagcacccttggtctctgccctctagatgccagcagtacctcccccacacacttcttctccaggttgtgagagccaaaaatgtctacagacattgattgcctaatgtctcctggcaacaaaatcacttcccacagagaaccactgcaataaaggaaaaaataatcagaaaaggaaaataataatggtgatagcatttaattgtccattagtgcctattatttacctaaaaaactcttaatccatgttctgctttgaaaatatatgtgttaaataattgtaaattaaggcaatataccagtttggtcttgaatattggaatttttgtttggggaaaatatagattttcccttcagcagtaagcaaatatcttagggatatgaaagtaacacctcatgacagatcaggaaatctgaagtatttagcagtgtggccaagaaagaacccaaatttattaatgtttgacctagggagtatttttcttatttaagcagtctgcttgatataaatataaatcatcatcattatcatccaaggcactttggaaaaatagaaacttctgtccctctcacaatttttgaggatgattataagttatgtttggaagccactgttcctatccacatggacattcatttatttgttttagttatataagtaaatcatgtttaatagagtgttccagggaggtgagattgaataaccataaatttggggtcacatcgctaactgtgtacattcatgtttatctgtaaagaagtgaagggagaaaggagaagtgtgtgtgttcagttttccaaggggtgttggataacaaccttttacaccaaacagtggggaaaaatgactcctttttttttttttctaagagaactgaatgcagtggcacagtcacagctcactgcagccttgacctcctgggctcaagcaatcttcctcagcctcccgagtagctgaaactacaggcacaggcctcttcacctggctaattttttaattatttgcggagacagggtctccaactcctgagctcaacagatcctcccacctcagcctcccaaaatgctgggattacaggtgtgggccaccgcacctggcccatgactacttttaataactagattttggtagtgtctgattagatgttaaaatgacttctgtctgttctcttacgtgactcaagtcttatcaacagatgttttctgaaagagtgaaggcaagaagaaatgttgggtatgttttgtaaaaagccctgcacaccccagagagcagagtgttgatgaaactggaatgtgtggctccattgttcaatctttaggtatctattcctgtactatagaaaaagtgtggaaggcataaatagtagtatgtgtagagttgagaggttgatggtattttagagtgaaattggccatcctcattgtagccagttcctctgtagacatttgtattagtctgttttcgtgctgctgataaagacatacccaaggctgggaagaaaaagatgtttgattggacttacagttccacatggctggggaggcctcagaatcacagcaagggcgaaaggcacttcttacatggtggcggcaagagaaaaatgaggaagaagcaaaagcagaaacccctgataaacccatcagatctcgtgagacttactcactatcacgagactagcatgggaaagaccagcccccgtgattcaattacttcccccaggtccctctcataacacgtgggaattccaagagatacaattcaagttgagatttcggtggggacacacaaccaaaccatattatgctacccctggcccctccaaatctcatgtccttacatttcaaaaccaatcatgccttccaaacagtctcccaaagtcttaactcatttcagcattaacccaaaagtccacattccaaagtcccatctgagacaaggcaagtcctttctgcctgtgagcctgtaaaatcaaaagcaagctagttacttcctagatacagtgtgggtacaggtattgggtaaatacagccattccaaatgggagaaattggccaaaacaaaggagttatagagcccatgcaagtccataatccagtggggcagtcaaatcttaaagctccgaaatgatctcctttgactccaggtctcacatccaggtcatgcggatgtaagaggtggcttcccatggtcttgagcagctctgcccctgtggctttgcagggtacaggctccctctcagctgctttcacaggctgccatcaaatgtctgcagcttttccagaagttgtcagcagatctaccattctggagtctggaggatggtggccctcttctcacagctctaccaggcagtgccccagtagggacttgtgtgagggctccgacctcacattttccttccacactggcctagcagaggttctccatgagggccctgcccctgcagcaaacttttgcctgggcatccaggcatttccatacatcttctgaaatctaagcagaggttcccaaatctcaattcttgacttctgcacacccataggctcaacaccatgtggaagctgccaaggcttgtgacttccaccctccgaagccacagcctgagctatatgttggcctctttcagtcacagctggagcagctgggacgcaaggcaccaagtccctaggctgcacacagcacggggaccctgggcctggccacaaaaccactttttcctcctaggcctccgggcctgtgatgggaagcgctggcgtgaatgtctctgacatggcctggagacattttctcgatggccttggggattaacattaggcttcttgctacttatgcacatttctgcagccagcttgaatttctccccagaaaatgggtttttcttttctgtctcatagtcaggctgcaaattttccaaacttttatgctctgcttcccttataaaactgaatgcctttaacagcacgcaagtcacttcttgaatgctatgccacttagtaatttcttccaccagataccctaaatcatctctctcaagttcagagttccacaaatctctggggcaggggcaaaatgccgccagtctctttgctaaaacatagcaagagtcacctttgctccagttcccagcaagttcctcacctccactgagaccacctcagcctggattttattgtccatattgctatcagcattttgggcaaagccattcaacaagtctcttaagtaaagttccaaacattttcctatttcttctgagccctccaaactgttccagtctctgcctgttaccctgttccaaagttgcttccacattttcttgtatcttttcagcaatgccccactctgctggtaccaatttactgtattagtcctttttcatgctgctgataaagacatgcccaagactgggaagaaaaagatgtttaattgaacttacagttccacatggttggagaggcctcagaatcatggcgggggagaaaggcacttcttacatggtggcagcaagagaaaatgaggacgaagcaaaaagcagaagccccaataaacccatcatatctcatgagacttattcactatcacgaaaatagcacaggaaagactggcccccatgattcaattacctctccctgggtccaagccacaacacatgggaattctgggagatacagttcaagttgagatttgggtggggacacagccaaaccctatcaacattgaatacaatctgtagtatcaaatattgaaaattctagtgatgaaatgaggattattaattcaataatcagtgcatttgattataaaacttctatcatattaagggaatttattgcttcatgctgtatttgtgtttcctttatattgcaatgatgtttccataatttaaaacgaatcagaactcttctatagatttttcaataaaattaatttctagatgtctactcttcatttaaataattttggtatcctggtgaattctacttttcttcaaatatacatatctgggcaatgtggcatcttacaataaggctttccaatattaatgttagtttcttacaattgtcccttttacttttttattttcttacagtgcctacaccaactaatgttacaattgaatcctataacatgaaccctatcgtatattgggagtaccagatcatgccacaggtccctgtttttaccgtagaggtaaagaactatgggtgagtgtcactcttttatttatcctttttattccatttttgtttaggtccttggaaattccacaactgtgttctttcatcagccttcccacgtggcaaaacattctaaactgcttatagaggtccaaaagtactaaagatgcaaattctttgccaaatatttcttgcctcttatttcctcttccttatcagtattgaaatagagaagtatcactaaacttctgagattagcatgacaaataaagctaatagttactatgtcatcttcctgtagtgtatttttagtagaacaatataaatttcaaaaaacttttttgacaactgttagtttttttaatgtgcttacttctataattaacatatataaatggaatttagagttgtttaaaaaaacagatttttaaaaaattgaatgtggaatgtggcttgcataggtcttacattttgaattgagcctctttactgtaacagagtttgtagttcttctaactaaagagtaagggtttcctactttctctggcgtctccatcctattcttagctctgctctttctaccgctttgtgctgtgaataaaaagcaaagcacagacagaaatggtttgagtttatttaataacaataaaagttatcttcgcatttttttattctttttagtgttaagaattcagaatggattgatgcctgcatcaatatttctcatcattattgtaatatttctgatcatgttggtgatccatcaaattctctttgggtcagagttaaagccagggttggacaaaaagaatctgcctatgcaaagtcagaagaatttgctgtatgccgagatggtgagtagaatgtgtacacatgtaaattttaaattggaaaatatttatacatgtcttctgtatgtttgcttttattagcagttgctgaaaattatcacaatgcttaagaaacacttggaggaatttagagtcagtacaggttgagcatcccaagtctagaaacccagaatgctccaaaatctgaaactttttgagcgccagcatggcactcaaaggaaatactcattggagcattttggatgttcagatttagaatgttcaactggtaaatataatgtaaatattccagaatccagaaaaaaaaactcagaaaccgaaaatactactgatctcaagcgttttggatatgggatactcaacctgtatcctccccttctttcaagccccacaaaatagggctaacaggtggccatcacttagctgcttctatgccatgacatttccacttcatacaattatgggtctgtgctgcccagcggtcccctgcaccacccttgcccttcccatcttttgtcattcatttgtaagttatattcactaaggactttggcagctaactcttattctgaatgcctggggaacctgaataccaccttaatacattaaaaaattgcagagttccttattctcttcagccactgtgattttcaggtcttcagtcttccagcatcccactcccatagtgtacctgatgtttgctgtcacctcaaactcttgaatctttaattccagttcctgtattccaactatgacatcctgccttagctctcagaccctgactcctgggtaaaagacacctttagtcacttgactcctccctagtcttctagcccttgggtccctttccctctagcctcacttcctttctctgctcctgccttttagattgtgccacctcggtctcttctacaggctcttcctctccttaccctttaaatacttttcttccccagagtccacaattttgtcatatgattaccacaccatctgcatgttagatttttttccatatagatttatcaagggcctactacgtgccggaaagtatactgggccctgaggatacactgatgggttaaaaacagacctgcctggcacacagtggtacacagtaatatgtgaagactagataaatggttcacaacaaagtctcaaacatcaaagacctaataaatatttatggaataagttctgatttttcacagtaaaaagagttttgatgagggaagaaaactaatgccatttctgaaacgttttttagaatccaggcttcttaatccacagaagcaaagataaaggaaaaattacttaatagagtctatattatgtgaagtctttttttaaccaaagtttataactatttttatttacaactagaaatgaaattaaactgctaaataggcattcagattaaataagagtacttcttgcctgagatttatgaaacatttgtttattaaggaccccgagactatcttctagatatttgtggagtggtttaaatgtggtcctgctttagaacaaccagaacaaaaacaataggttgattgatagattctggtaattttatgaaatgtaccatttagttccaaggccagtatttattatacttcctcctcctccttccccaggaaaaattggaccacctaaactggatatcagaaaggaggagaagcaaatcatgattgacatatttcacccttcagtttttgtaaatggagacgagcaggaagtcgattatgatcccgaaactacctgttacattagggtgtacaatgtgtatgtgagaatgaacggaagtgaggtatgtgtttcacatttttcataatggaaattcttgtgtagctagcaaaagttgttcctttctgtagtgtaatgaaaataggatgcttataaatattcaagcaagactcacagatcatagatttgataagaaaaatatgtgaatgctattaaagcaaaaatgatacagagttagtcactaacactgaccatgtgaatacatttagtttttatttgcttcatttagcagaatggctctaatctaggatttttcccagtacacctccattgctccactggtaaaatgaggattttcttcctcattggcggtgacgtaaagtaatattaatacttctgtttcccaccagctaaatttctggacaaatgaataggacaaatgaacatttgttagtttaacaactaacaataaacattcctgcaatttgagtttttaaatttaccatttttataaggaatataacagatgcatagtatcgtgctgtgttgaagtaacaaattgacttattgatagtaaagctatttttagacatgttcaagtcaatcatatatatttcttcagttgtttgaccaggactaatatggtgattttttttttttttcagattaaaagaagctgtgcattttcactgttttcttttttcatctagatccagtataaaatactcacgcagaaggaagatgattgtgacgagattcagtgccagttagcgattccagtatcctcactgaattctcagtactgtgtttcagcagaaggagtcttacatgtgtggggtgttacaactgaaaagtcaaaagaagtttgtattaccattttcaatagcagtataaaaggtaagttcttgccattttttttctaaatatagagggagcagtaactaaaataggatcatgtgaggaaagcaaactcatttgcagtttcaaaagatctgttttaacaatattcatttgcattagttccattccttagagaagttcaaaattaaaaataaagcagtttctcacacatttaaagatatagaacaactaatttggaaagccatgtgatggccccttgacccaggaaagaaaaaatatataataagtacataaaactacacaaatgtttgcatttcaggattatgaattataagtcagtttgttacttcaccatagcaagatgttgtgaatccactaaaatgttctttatggggattgtaatttaaagactgaagagcaggaacgatcactggttacaactgtatgacgtggactggacaaagactcgagattaatatccaaaaaagtttatagatgggtttgaataatagataatgggtcatttttataacattttacaataattaattttatttcatcttttaatgtggggggtggggaggtagagatatatatgctagaacttgaactttagaactgttactctcaggtgtcaggaaccttaaagaagtttggacttttctttgcagttaggaaatgtaagtgttcattatagataatttataaaatatgaaaaaccagaagaaaacaaaataatctgtagttctaccatgcaaaaataccccattattcacagtttgatattttctttagtttttctacatagacatgatcatattgtatagtatatatgattttgtgtattgctttaagcatatattgtaactcatgctttgatgattatctttgtgtgtgtgtgtgtgtgtgtgtgtgtgtgtgtgtgtgtgtgtatacatatatttttttccttaggatttttttagaatagatttcataggtttaaaattttatgatgcaagtatattttcgaggaatggaaatataggctgaagagccagaacaaacacctaaaattcaatactaataacttcaagccattatatgaaggtttcaaataggtgatttaaagcagtgcaatgcattttatgctaattttcgttatgctatttgaaaaataaaacccttcttaatgctcaaaatttgaaataatgcaaatgccgcagatttgtttttagcctgaattatacactgcactgatagtatggccacacggtggcattgccgtggctcctgagcagcagccctgcctgcttgcctcaatgccttgcagccagcacttgctcagcccgtgggacttctaacagcactaatgttggttttgtagttattttcctttttacttttgtaatgatttaacttttttcacaccctgtaataagcgtaatagaagcattcattagtaacttccatagttagaaaattctgggtaacaaaatgccctaaaggatgccggacattgtcacagtatgttagagtgctgttaatttggaagagagaactatgaaaaaaaaaaaatactgaagattgtgctgcaaaaataaaaggcagcattacagcaaagtacacaatggtgattctagatgtatgtgcttggaaacaaatctttcctattttatattatttatgtctggtttataactaaggggactttattcctgtgcagcattgctgtgtgcatgtacatctgtgaagctttataagtatttgcagtcgtgaaataaatgtaacaggaaattctgaggagtggggctaaatcatcttaagagcaataaacattgccagaatttctttctttttttttttgttgttttgttttgttttgaaatggagtctcgctctgtcaccaggctggagtccagtggcacaatctcagctcactgctacctccacttcccaggtccaagcgattctcctgcctcagcctcccacgtagctgggactacaggcgcatgccaccacacccagctaatttttgtatttttagtagagatggggtttcaccatgttggccaagattgtctcgatctcttgacctcgtgatccgcccacctcgacttcccaaagtgctgggattacaggcttgagccactgtgcccagctgccagaatttgtttctaaggagaggtatttttaaaattattcttttgcatttttaaccgaaagaaatgcataaccctggaaacacactgtatgtagggctgtaaggaaattattgtagaaaagctattttaactatgttgtgtcatagtagaatagtcccagaaagttctagaattgcagagctgggaagaaccatattgctatctaagacagatacctaattttttactcagatttcctaacttctgcttccttcagtgttctttaaaactctggccctattcactaatttgtaaatctattcaagaatggcactaagactttttgatagataatagcagtattccatcttaattgtaacttgtgatttctgccttttttaaggttctctttggattccagttgttgctgctttactactctttctagtgcttagcctggtattcatctgtttttatattaagaaaattaatccattgaaggaaaaaagcataatattacccaagtccttggtaatgtatttaatttttttatatacactaaaaagttaacttgaaccttttttgatagtttcttaaattatgtttttaaagtagaatgatattcaacaagatgtcacctgccatcaatcagtcagtctaccacacatgcaaaatcacatactgtgtcttttgctgtgcagcaagtattttgtttttttttttattctcagggaaaaacacggtgagacaattctgttaaagatcttaaagtctagggggaagaaaagataaatatacattggctatataacgtgtgatagattcaaagatttatacctgagcccatgaggactttgtccagctttggggtggggttagtcatggcttttccagaggcaatgcctgagcagtcttgagggacatacaggagtttaggcactaggggacagaatgtgctgaggtccagagccaagaaagcatgactttgaaagctctgcaaatacagaaacacttcattatggttggagtatgaaaggaaagttggccaaaaatgagactaacgtaggagtttgacgattttaatgtccaacatttcaaagcctttgatgtaaagaacatttaaaggtaacagaatagtatctatttgagtcaaatatgacaggaataatatctgtgatgctcaaagggcacattaaaatttgctataaactacctttaaagtggataagaactctcaacagttagtagtcaactcacaaatgaattataatattttattcttactagtaattaagcacaaagtaaccttgcagtatgccattttacacgcgctagagaagaaaaaagaaacctggatatccagtagtaccagcagtagcataacgggtaaatgctggtgaaaagtaatctagccctggtaagaataaaagcacacagtgggtattcagtgtaatagtgacgtaaacataccatttctttgatatggtcactccactcttaaaaaatgtattataaggaaataatttcataaataaaaagatgtacaggatatttaacatgttccatagctagtaaaaattggaaacatttccccatctattaaattatttatcagtataaagaaataatatgagctactaaaaattataatgatgaaggcaagtaatgagaatattacttaagtagatgtgcccactttgtaaacataatgtgcgtacatgtggaagataattgtattaggattctctagagggacagaactaatggaatatatatataaagatatatatataataccaaataaactcccctttatataaatctatattttatatattatatattatatatattttatatgttatataatatatattatatattatatataatatattataaattatatattttatataatatattataaattatatattttatataatataagttatatattttatatattatattataaattatatgtttatataatatattataaattatatattttatgtaatataaattatattttatataatatattataaattataaattatatattatatattataaattatatattatataatatatattaattatatttttcatatatatatatataaaggggagtttatttagtattatttagtattaactcacacgatcagaggtcccacaataggccatctgcaggctgaggagcaaggagagccagtccaagctccaaacttgaagaattcagagtccgatgttcaagggcaggaagcattcagcatgggagaaagatgtaggctgggaggctaggccagtctctcttttcacatttttctgcctgcttacattctagccatgctggcagctgattagattgtgcccattcgggttaagggcgggtcttcctttcccagcccactgactcaaatgttaatctcctttggcagcaccctcacagacacacccaggatcaatactttgtatccttcagtccaatcaagttgacactcagtattaaccatcacagtaacgtacaaaaagcaacatatattagtaagatatctgatggctttttaaaaattctaaaactttgtttttaatattactatgggacctttcattaaaaagaaatggcaacatctgattcacccattatcctaaatgtgccatttggtggtccattacttcagacctttgttttttttgagggtaggcacttaagcttaacaattttttatctttaatcaatttttctccccatagatctctgtggtaagaagtgctactttagagacaaaacctgaatcaaaatatgtatcactcatcacgtcataccagccattttccttagaaaaggaggtggtctgtgaagagccgttgtctccagcaacagttccaggcatgcataccgaagacaatccaggaaaagtggaacatacagaagaactttctagtataacagaagtggtgactactgaagaaaatattcctgacgtggtcccgggcagccatctgactccaatagagagagagagttcttcacctttaagtagtaaccagtctgaacctggcagcatcgctttaaactcgtatcactccagaaattgttctgagagtgatcactccagaaatggttttgatactgattccagctgtctggaatcacatagctccttatctgactcagaatttcccccaaataataaaggtgaaataaaaacagaaggacaagagctcataaccgtaataaaagcccccacctcctttggttatgataaaccacatgtgctagtggatctacttgtggatgatagcggtaaagagtccttgattggttatagaccaacagaagattccaaagaattttcatgagatcagctaagttgcaccaactttgaagtctgattttcctggacagttttctgctttaatttcatgaaaagattatgatctcagaaattgtatcttagttggtatcaaccaaatggagtgacttagtgtacatgaaagcgtaaagaggatgtgtggcattttcacttttggcttgtaaagtacagacttttttttttttttaaacaaaaaaagcattgtaacttatgaacctttacatccagataggttaccagtaacggaacagtatccagtactcctggttcctaggtgagcaggtgatgccccagggacctttgtagccacttcactttttttcttttctctgccttggtatagcatatgtttttgtaagtttatgcatacagtaattttaagtaatttcagaagaaattctgcaagcttttcaaaattggacttaaaatctaattcaaactaatagaattaatggaatatgtaaatagaaacgtgtatattttttatgaaacattacagttagagatttttaaataaagaattttaaaactcg

SEQ ID NO: 160 - DNA, 40034 bp, Homo sapiens
catttccctaaataccgccccccgctgcaatgcctcgccacccttggctgcctcctctaccccagggctcccagcaatgactgggtcaggcgcctccttcacttgctgtgagtcccttatcacaactgatcactccgtggggtcaccgctgctctggcgtctacctcccccaacaggttggggtttctaggagggcagctccagaggttgcagaacactccgctgcctctccagagccaggcacacagcaggcgctccataaatgttcgttgggtaagtgctgaatcccaggttccctacctgaaaacttggtggcttcttaagggtgtggtctaagtcccagaggaaaatggccaaatcttaattcctgtttttcttttcttataatggggacactgaggcccagagaagtcaaagggtggctgcccggggtcatgtagtccctgtgtggcttcaaacttaggcttctgctgtccccgacgcctgtgtccctacctcctgatgacacagcctcctaaacataaactcagtaaaaggaggaccctatggctcattggaaaactgaggcccagagaagcaagggtgccctccccccaggtcacactgctggttggcagcgccttgtgccgtaagagagctggttgagggcgcagatcgaatcccagctaggcgacctctggagagtggctttccgggactagagcctcagtttccttattctgacaaatgggcgcctgacagccccaacctccccaggtcgtcgtagggctgagctgagggtgtacagtggtgcagcgacgacccaaggaggtattaatacatatgaactcatattaatacatcgctagtaataggactaaaacaaccatgaacatatggtgagctctctggctgctgttgctagcattattattagaacagctggtggggaggggcagagccctcagcctcttcctcccacgccatcgcttggagcctcagtttccctagatgtccaagggggcaccttcccccttcccaccatgagaaaaagcactttgagaagcgggtggtcaaaaagaagcgatctgagcgttccccaccctctgcctcagtttccctacagcccgtgaaggccccgcccctcccggcacctttcaggccgcgtccacttggccgcgccctctgccttccgcccgcccgcgcaggggcctcacctggagcccgcggcgccgcaggaggctcgactcgtccatggcccgggagtccgcgccgccaggcccgcccccggccccgccccggcctgccaggccccgccgccaggtgccattggccaggccggtcagctgacacggcctggccccgcccctcccggggagcccgaccacagggccccgcccccactgggcgagctggccccgcccctccagcagagcgcagaagtaaatattttgcatgaatcctctcagaagtaaggcagcatcgttcagccccattttgcagatgaagaaactgaggctaagataggttaatcaatatgcccagcgcattggccgggcgcagtggctcacgcctgtatcccagcactttgggaggccgaggtgggcagatcacttgaggtcaggagttcgagatcaccctggccaacatggtgaaaccctgtctctactaaacaaaaaaaaccaaaacaaaacaaaaaaaaaattacttgggggtggtgacgcgcgcctgtaatcccagctactcagaagactgaggcaggagaatcgcttgaatccaagaggcggaggttacagtgagccgggatagcgccgctgcactccagactgggcgacagagcgagactctgtctcaaaaacaaaaacaaaacaacaacaaaaaatgtgcccagtacacacagcagaacgggttctagggtgaggcgagtgaggatctcacccctgtgcaaaatttaaggtggccccacaaaactcagccatcaagagaaataatattttaaaaacataaaattaatgaaaacatttatgatgaacaaaacatcaaaacttttattttttattttatttttagagacggggatctcactatgttgcccaggctggtcttgaactcctggcctcaaaagatccttctgcctaggcctcccaaagtgttgggattacaggtgtcagccaccgcatatggccaaaacaccaaaactttttttttttttttttaatttatgagacgagtctctctgttgcccagactagaatgcagtggcatgatctcggcaacccctgcctcctgggttcaagctattctcatgcctcagcctccctagtagctgggactacaggtgcccaccaccacaccaggctgattttttgtatttttggtagagatgaggtctcaccatgttggccaggcttgtctcgaactcctggcctcaggtgattcacccaccttagcctcccaaagttctgggattgcaggccaaagagttttggtgttttgcctggccaaaacactaaaactcttaagacatgatcagacccttgtccttgcaccactcagccttgtttgcctccctttaatcctggccctggtgccaataaaactttacttacaaaagcaggtagccgctgcagttgtcagtttcttttttgaggatgattgcctttttgccctaagtgtctcataaacaccatctctcacagatatttgaagataattgttctactccattttgcaggaggggaaactgaggctgagaaaagcccaaagtcccaaaatagcacccacatttaaaaaaaaattttttttttgagacagggtctctctctgtcacccaggctggagtgcagtggtgcaatcttgtctcattgcagcctctacctcccgggctcaagcgatcttcctgcctcagcccccataccccagctcccagagtaggtgggaccacaggcacatgccaccatgcctggctaatttttttgggttttttttgtagagatggagtaccgccatgtttcccgcgctggtctcgaactcctggcctcaagtgatgctcctgcatcagcctcccaaagcgctgggactacaggcatgagccactgtgcctggcttagcacctgcattttttctttccctgggactcgcactttctctgcagccgcagttgtcttcggctgccccactgtacagtgtggacactggagtatgctttcaggctcgaggggaccctaggaagggtcactgggcctgactgtccatgaggtactgtagaattgcatcaagttatggtggccagattgagcaaataaaaatacaggatgccagggaaaacttgtttttctcatacaattttaaaaattgacatataattcacataccataaaattcacgcttttaaagtgtgcaataaattcagtgttttaagcatactcacagagttgtgtaaccatcaccacgatctgattccaggacatttgtatcatccccaaaagaaaccctgtacctattagcagccagtcctcattccccctctctcagcccctggcaactaccaatctgcttcctgttctatgaattttcctgtgctggatatttcataaaaatgaaaacataacatgtggccttatgtgtctggcttcgttcagcatcatgctttcaagatgcacccatgttgtggcaaatatcagtacttcattccgtttcatgaccaaataatattccattgtatatatgtacatgtacattttgttgatccactcatttgttggtggtcacttggattttttcacattttggtagctattctgaatagagctgctataaacattggcatacaactttttgcatagatttatttctttatttatttattttgagatgaagtgttgctctgatgcccaggctggagtgcagtcgcgggatcttggctcactgcaacctctgcctcccaggttcaattgattctcctgcctcagcctcctgagtagctgggattacagacacccgccaccactcccagctaatttttgcatttttagtagagacgggggtttcaccatgttggccaggctggtctcaaactcctgacctttaagtgatccatccaccttggcctcccgaaaggctgggattgcaggtgtgagctaccgccccctgcctttgtggatatattttggttctcttgggtacttacctaggaatggacttccggggtcatatggtgtaactctatgttttgggttgttttgttttgttttgggacagggtcttgctctttcgcccaggctggagggcggagtagctgagactacaggcacatgccgccatgcccagctaattttttgtattttttgtagagacaaggtttcgccatgttacccaggctgatctcaaaatcttgggctcaagcgatcctcctgccttggcttcccaacgtgctgggattacaggcatgagccactgcgcccagcaactctatattttaaatttgtaaaagacaaccaggctgttttccaaagcaaacacccagttaaatttaaatttccataaacaatgaatgttttttcagtgtaagtatgcccccttcagtacttgggacatagttgcattaaacaacaatgtgttggccgtgtgtgctggctcatgtctgtaatcccagcactttgggaggctgaggtgggtggatcatctgaggtcaggagtttgagaccagcctgggcaacatggtgaaaccgcgtctctactaaaactacaaaaattaagggggcgtaatggggcacgcctgtaatccccgctactcggggggctgaggcaggagaatcacttgaacctgggaggcagaggttgcagtgagctgagatagtgccagtgcactccagcctgggtgacagagcgagactccatctcaaacaaaacaaaacaagacaaaacaaaacacaaaccaatatgttggttgtctgaaattccaatttaactgggaatttaatttaaatgttatttaatgaataatgactacgagtgagtttgttaaatgaatgaatagattttctcctggcaaactcctatgcatccttcaacaccctctttagatgacccctcaggggcatcagggtctcttggccacatggagggaagctccccactcttcgggctgaaggtccctgagaaggcagaagtcaatgggggtggggaagtcgtgtgttttatctggcagtcctacactaagtgaacttcaggctgtagcttgcacaccccaagtgatgagaagctcatgtcctgcaatggccaattgttctgactctgggcagctctgcctcaaagttctcccttagtccagcctggggtggacatgtgactcagactcgtttatccacctcagccactgtgattggttcaaggtgtacatgtgacccaagctcagcctatcagagccctccctggggctttgactggaatcctggggaaagagaggttccctgaaccagggttgggttgggcatgtgggaacatgctggagagagccaccagagaggtctcaaatccgctgctccatctggagaattcctacactgaactgcctcctgaacaacccctcagtgggcaagaaggagtgcttattgagtgactgactggactgactgaatgaatgaatgcagtttttctgtggttaacacacacacacacacacacacgcacacacacaagtatatatatatatatatttgtgtttttttgttttttgtttttgagacaaaagtccagctctgttggccaggctgaagtgcagtggagcaatctcggctcactgcaacctccgcctcctggattcaagcaattctcctgcgctcagcctcccgagtagctggaattacaggcacctgccaccacacccggctaatctttgtatttttagtggagacagggtttcaccatgtttgccaggctggtctcaaactcctgacctcaggcgatccacccacctcagcctcccaaagtgctaggattacaggcatgagccactgtgcccggcctaacatctatatattcttcaaaatccacttcaaattctctttgagaagtatcagaggaccttgtattgaatgaacaaatacattttattcttgtgagcttctatgtacccatcaaaactctcctcacatgtctctataagggacatcaggaagtgtggtggttgaatgaacttttttcttggtaacctcctgagtcttccttaaaacatcctctaatctgtttgggagcggtggctcatgcctgtaatcccagcactttgggaggctgaggtgggaggatcccttgagaccaggagtttgagaccagcctaggcaacatagtgagaccacatttctttttttttttttttttcagacagagttttgctcttgtctcctaggctggggtgcagtggcacaatctcagctcactgcaacctccgcctaccaggttcaagcgattctcctgcctcagcctcctgagtagctaggattacaggcgcgtgccaccatgcctggctaattttgtatttttattttattttatttttttgagacagaatttcactcttgttgcccaggctggagtgcaatggcacgatcttggctcaccgcaaaccccgcttaccaggttcaagtgattctcttgcctcagcctcccaagtagctgggattacagacaggagccaccatgcccggctaattttgtatttttagtagagacggggtttctccatgttggtcaggctagtctcgaattcctgacctcaagtgatctgcccacctcggccttcccaaagtgctgggatacaggcatgagaccacatttctaccaaaaactgaaaaaaaaaaaaaaaaagctggatggtcgaggggcggtggcttacgccggtaatcccagccctttgggaggccgaggccagcagatcacttaaggtcaggcatttgagaccagcctggacaacatggtgaaaccccatctctactacaaatacaaaaattagctgggtgtggtggtgcatgtctgtaatcccagctactcaggaggctgaggcaggagaattgcttaaactcaggaggcggaggttatagtgagctgaaatcgcaccactgcactccagcctgggtgactgagcaagactctgtctcaaaagtaaaaaaaaaaaaaaaaaaaagaaaagccaggcatcatggtggcattggcctgtgtctcagctatatcagaggctgaggtagaaggatagcttgaaactgggaggttgaggctgcagtgagctatgattgtgtcactgcactccagcctgggtaacagagtgagaccctgtctcaaataaaaataataattaaacatcctcaaatgatccctcagaggcattagaaagtcctgattgaatgatgaaaattgttcttgttgatgagtgatgcctatgagtttgttaaattaacaaatgggttgtctcctggctaactcctatgcatccttcaacaccctctttagatgatcctcagcgacgttagggtctcttgccacatggagggaagctcggccctcctcctcgggctgaaggtctctctccctgagaaggcggaagctgaggaggtggggaagtgctgtggttcctcccgtcatgttttctggggccctcgtgactcgatccttcctgcttcacccgcccccgagtctgtggggcacctgaaagtggggcagccctgggaacttatctcagacgagcttctggggcagctgggtggggccataaggggcccacagggcctcttggcaggcctagagacggagggaaggaggtgggcttgccaagatgtggcaaggggaaggtgggatgtggggaacttcagagggagtgtcaggttgtgacttcaataaggggagaaataccacttcacctttgtctggggtacccctccagctcacacacctgccatggctccctaccgccctcggagaaagccaggccctttagcctggcgctcgaggccccagcccatcaccccacagaaacccagacccactgtgtccatcttggtggtccccaaagcacctcctctggacttttgcctctgctgtggcctctgccggagatgccctgtaattctatacattctagctcaagtgtccctcctccaggcagtcctccctgctccacttcagggcacccggcctccatctgttcctgatcccaaggggctaggggcgtctgtgtccagcttttcacctccccagccctgtatctccctccctcgatgtttttccagcagctgccaggcagaggccactggggaacaacaacaatgactaatcacactggccagcgggtggacagcgctcactgcaagccaagccctccttcatactcacaaaagcccattttgcaggtgggaaagatgaggcctgagagggccaaccttggtgcgggtgggggaagccctgaggcacggtctccactctggaaggggcaaaactatactccacaaggggtggtttgaatccatctcttcatctccagctggggcctcaggtggtctgagtgcccctggactcagtttcccaatctgtgaaataaggcaagtgagggactctccaggaattggtggagttgggagggtctcaggatggtcaggagggggccatgactttcctctgatctctacctatttcctccacctttcttgttattttttgagcagggtcttgctctgtggcccaggctggagtgcagtggcgcaattagagctcactgcagtctcgacctccctggcttaagcctcagcctcccaggtagctgggactacaggcacctgccaccatgcccagcaaattattttttgtagagatggagtctcaccatgttgcccaggctgctcttgaactcctagcctacagcaatcctcctgccttggcctcacaaagtgctggattacaggcataatccaccctgcctggcctcctccatctttatgtatctctctatctctgtccctttctctgtctctgcccctcccccaggcctcacacatccatcccccagctgaccctggcctgggccccggggccagagaaggctgtcctgtatggggtcacagggcccccgtccccactgtgccaggcccaggacactgagtctttgtccctaactcactgacctcatagcctgctgggcgcctgaccctggccagctcagctgcccctcggagccaggcttcttgaaggagggacctcctcccaggaagctgaaccgcattgcacaaccctggccacttgggcctcagtttccacagatgctcatccccaggagagaccctctccttctccctcctcagtgcccctggactctaagaatatttcttttttctgtagatgcatctcacgtaacctaaaattcatctttttttttttttttgagacatagtctcactctctcacccaggtgggagtgcagtggtgtgatctcggctcactgcaacctctgcctcccgggttcaagcgattctcctgcctcagcctcctgagtagctgggattacaggtgcatgccatcacgcccagctaatttttgtatttttagtagagactgggtttcactgtgttgtccaggctggtctcgaactcctgacctcaaatgatccacctggctcggcctcccaagtgctgggattgcaggagtgagccaccgcgcccgggccggaaattcatcattttaaagcaaacgattcagtgacatttagcacattcagtgttgtgcaaccaccacctctatctggttccagaacatttgcatcaccccaaaaggaaaccccgcatacatcagcagtcacttctcactcccgcctccccccagcccctgacaaccactcagctactgtctgcctctgtacatttgcctattttggatattttatataagtggaatcatacagtgtgtgcctttcctgtccatcttcgtccacccagcatgatgggtttttttttttgtgtatgtgtgtttttttttttttgagatggagtctcactctgtcacccaggctggagtgcagtggcacgatctcagctcactgcaacctctacctcccaggttcaagtaattctctctgcctcagcctcccgaatagctggaattacaggcacatgtcaccaggcctggcaaatttttgtatttttagtagagacagggtttcgccttgttggccaggctggtctcaaactcctgacctcaggtgatccgcccacctcggcctcccaaagtgttggaattacagatgtgaaccactgcacccagcccagcattatgtttttgagggttcatccacatggtagcttggatcagagcttctccactgacatttagaggctttgccgacagtggggagggaggggcaggaaacaaaatactcagaggctaagaaatggaacatgggggaaagactaagttgcatctcttaaatttttttttttttttttttaagagacaggatcttgctctgttacccagactggagtgcagtggcacaatcacgattcactgcagcctcaacctcctgggttcaagccattctcccacctcagcctcctgagtagctgagaatacagatgtgtgccaccacgactggctaacttttaatttatatatatatatatattttgagatggagtgtcactctgttgcccaggctggagtgcagtggcgcgatctcggctcactgcaacctccacctcctgggttcaagcgattctcctgcctcagcctcctcagtagctgggattacaggtgcctgccaccacacccggttaatttttgtattttcagtagagacagggtttcaccattttggtcaggctggtctcaaactcctgacctcgtgatccacctgccttggcctcccaaagtactgggattacaggcgtgagccaccgcgcctggcctaattctttattttttatagagatggggtcttgctatgttgtttaggtagacccaaactcctggggtcaagtgatcctcccacctcgacctctcaaagtgctgggattagaggggtgagcccaggtgcacaaggctggagcttggcatgtggggaggtgggcattgtggagggccagcatgctgcaagctctttgtaacaatttgttggaaggatgaaattaggccatccaagaacactgccctccttcagctcttgagtctcagattcagaagctggcgagatggcccggtgcggtggctcacgcctgtgatcccagaattttggtaggccaaggcggacggatcatttgaacccgggagtttgagaccagcctgggcaacatggcaaaaccccctctcttaaaaaaaaaaaaatgcaaaaattagctgggcgtggtggtgcatgcctgtagtcccagttcctggggaggctgaggtaggaggatggcctgagcctggggaggttgatgttgcagtgagccgtgattgcaccactgcactacagctgggccacagatcaagaccctatctcaaaagaagaaaaaaagaatttggcagccaggcacggtagctcacgcctgtcatcccagcactttgggaggctgaggtgggtggatcacttagggttaggagttcgagaccagcctggccagcatggtgaaaccctgtctctactaaaaatacaaaaattagctcgatgttgtggcagttgcctgtaattccagctactcgggaggctgaggcaggagaattgcttgaacccgggaggcagaagttgcagtgagtggagatcatgccaccacactccagcccgggcgacagagcagggctccatctcaaaaaaaaaaaaaaaaattggctagagagggccagagacctggccaagtgcatggaaccacaggtggcccatgggcccatggggctggcatctgggtgttcagttcaggtctggggccagcagggcagaaccccctagaaccctgacttgctccaaagtcagacttgctccagagtctgtggccgccaccatcaccaccaccacggagctgacttcctgggtttctctttcactttgacttgccttagggatgggctgtgacactttactttttttcttttttcttttttttcagtcttttctccttgctcagcttcaatgtgttccggagtggggacggggtggctgaacctcgcaggtggcagagaggctcccctggggctgtggggctctacgtggatccgatggagccgctggtgacctgggtggtccccctcctcttcctcttcctgctgtccaggcagggcggtgagtcccctgaccctggcatggcggctcctcttgctgggtggaggcacgtgtatgtgtggagagctgtgggcctgctgtgtgggttggtttcatctctctgtgcctcagtctttcctgctgtcaaatgggagatgggcagtcatggcttctgggatcgaacttagacatctttcctctggtctagattttctcttctgtgaaatgcactaaattttttccacctcccggagttcaatgagaaaaaaaactaaggaaggaataaaaagcaagtatgtatctaataggtatacatagtatagtatcttatgtatgtagtttacaatagatagacatacataatataatgtatacagtcatttccatatttacggggcaatggttccaggaccctctgcagataccaaaatccaaagatgctcaagttcctgatataaaatggtaaagtatttgcatataacctatgcacatccttccgtatactttacttatttatttatttatttatttatttatttatttatttatttatttactgaggtagggtctcactctgtgtcccaggctggagtgcagtggcctaatcataactcattgcagccttgaccacctgggctcaagtgatcctcctgccttagccccttgagtagctgggactgcaggtgcacactaccatgcctggttaatttttttggtgtatactttttacagagacagcgtctcgctgtgttgcccaggctggtctcgaactcctgggctcaaatgatccactcaccttggcctcccaaagtgctcagattacaggcatgagccaccatgcccagccttcccatatacttttaataatctcaggccctgcacggtgactcactcctgaaaatccagcactatgggaggccaagatgggtggatcacttgaggtcaggagttcgagaccagcctggctaacatggtgaaaccccatctctactaaaaatgcaaaaattagccaggcttgatgatgggcacctgtactcccagctacttaggagctgaggtgggaggatcgcttgaacccaggaggcagaggttgcagtgagccgagattgcagcactgcattccagcctgtgtggcagagcaagactctatctcaataataataataataaataaactttccttctctgtacactggggatcagcggggtgctgactttttcaatggctcttgagatgcactgagtgcctgtagaatgcccacagcagtgctggccacacctcaaggtcccagcgccttcaggggccaggcatggctggagaccagcagcagggagggggcgagaggcagcccacgaggtatcctggagatagtggcagtgagtggtcagtccagggaaagggaaggaggatgggctttaggctctcaggggtgggtgggtgggtgggggttctgtgtcatcacagagagagatggaaggatggagagccttgtgtgttaagcatctttcccccctcaaggttggacacttggggctgtttcctggggtgccgccttctcccccaaggcttccaatctgcctgcagggctcaggacaggtccttcttgtgggagtgagggcgccggggtcttcctgacccatccatggtggcatccccctccttctctcacccagttccacacctagcagactgtggcaatcccaaagggcacggggatcccagtggctgagggaggtcgctgcctcctggagaaatgttattaataattgccctgactgctagtgggccaagtgtgcttgcctgggccagccctggcaggcctctccctgccatgcaccctctactgtctttccccatgctggcttcagacactggtgccaccccaggcacacctccacttctctctgccctccagactgttggtcttactgttctttcctgcaggggtacctcccgagagtgtctcccaaatatgcatctcaacctctgaggactaaagggtggtggatgaatggatagacaggtggatgggtgggtaaatgaatggatggatgaattaataaatacatgtatgtatgtatggatggatggatggatggatggatggatggatggatggctggatggatatatcggtaggtagataaatggatggatgggtgggtgtatggatgaatgaatacgtggatggatagatggatagattggtgactagatggatagatggatggttgggtgaatggataatggattaatgaatgcatggatgcatggataaatacatggatggatggatggatggatggactaatgaatacatggatggatgggtgaatgggtggatggtgggatggatggatggatggatggatggattaatacatggatggatggatgaatggacgaatggacggataaatgggtggatggtggggtggatgcatggattaatacatggattgatggatggatggatggatggatggatggatggatagatggatggggggtggatggatggatggatgaatacgtggatggatggacggatggtggggtggatggatggatgtatgaatacgtggatggatggatggtggggcagatggatggatgagtagatggatgaatgaacacatggatggatagatggatgggtagatgcgtggatggatggatgaatacatggatggataaatacatggatggatgggtaaatgggtggatggtggggtggatggatggatggatggatggatggatggatgggtagatgggtgcatggatggatgaatacatggatggatgaatacatggatggatgggtgaatgggtggatggtgaggtggatggatggatggatagatgggtggatggatgaatgaatacatggatggttggatagatggatgggtagatgagtggatggatggatgagtacatggatggatggatgggtagatgggtggatggtggggtggatggatgatggatgaatacatggatggatggatggatggatggatggatggatgggtgaatggatgaattcatgggtggatggatgggtagatggtggacggatgaataaatacatggatggatgggtagatgggcagataaatacatgggcagatggatggatgggtggtggtaggagggtgcatagatgggaaagtgggtgggtgggagggctgatgatcacttgggtgtagaccccaaggctgagcccttctccccacacagtgcaaggccaggaatgtcattatgtcttcattgcctttgcagctgcctgcagaaccagtgagtgctgttttcaggacccgccatatccggatgcagactcaggttcggggcagttcctcattgttggctgaggattatgtagggctctgcctgaccccatccacagcggcccctcccatggcctccaccaccaggccaaagacccagccctgcctgtggtcttgggagtccccaccccaccacctgctggcccattcttaccaggttcaagttgccctggagtagccagccgcctctctgaacattatcacttccctagcatggtctcagggctggtgtctgtgtccgttcagattggtcggtacatgggagaaagtacctgttaagcattttgaagccccccccccaacctgataaattattagaacatttatttcatttatttatttttgagacggagtcttgttctgctgcccaggttggagtgcagtggcctgatcacagctcactgccacctccaccttccaggttcaagctattctccagcctcagccttccaagtagctgggattacaggtgcccgccaccacacccggctaatttttgtatttttagtagagaccaggtttcaccatgtcgcccaggctggtcttgaactcctgagctcaggtgatggtgagccacctgcctcagcctcccaaagtgctgggattccaggaatgagccaccgtgcccggccatattgtcggaacatttatgctcctaatgcaccctgaaaagggtctgaacactaagcagacacgctgtccattcttttgtttgataacgatttactgagcatcttctatgtgcggacacagttctagacataggcaactggctatgagctcaactaacttcccaagaccacagcctagtggaagagatagacaacaggcaaacaaatgtctatcacaaatgtgatgatgtgttttgaagaaccagaggaggaaagttggggccctggggaccccccaaaaaaaaacaccagaggagggtgagggatagagagagaggtggcaggacatctggcctctgtgaggacaagttaggaggctgaggattcggaataggttgaggtgagagacggcaggggatgaggtaggaaggacgcggggagggtttaggctgaggtgacgctgaaagatgtaagcatcacaaagatttgtcttaggcacgaagacccctccagactctggtctgttcccaagcctacaggatctcttccaggctcggcctcgggccctagggacctgagatgctatcggatatccagtgatcgttacgagtgctcctggcagtatgagggtcccacagctggggtcagccacttcctgcggtgttggtgaggacccctctaccattcccaaaccctcacccaccatcccactcttgcttcaaccccctctggtgcccctactctcggatgcgtgatcttggctgggtcaacactccttcctgggcttcagtttctcatctaagaagagagagttggaggattgtggtggggggttggtcagtgaaggtaggcatcccagggtgggtggccatgagggtctctctagtccttttttcttcttcaccctttcacttatccacccatccaaccatccatccatccatccatccatccatccatccatccattttttcttttttctttttttctttttttgagatggagtcttgctctgttgcccaggctggagtgcagtggcatgatgtcagctcactgcaacctctgcctcctgagttagagtgattttcctgcctcagcctcctgagtagctgggactataggcacacgccaccacacctgctaatttttgtatttttagtagagacagagtctcaccatgttggccaggctggtcttgaactcctggcctcaggtgatccacccccccttggcctcccaaagtgctgggattacaagcgtgaggcactgcgcccagccctttcattcgtttcttcgctgtgtggtgcagtccttgctgggagatactggggtccctcaaacccctccagtcccagactgatctccaaggaacccccaggctgggggaggaggtgtacaagggacagaaaaggatgctgggggctgggcacggtggctcacgcttgtaatcccagcactttgggaggctgaggtgggcggatcacttgaggccagaagttggagaccagcctggccaacatggtgaaactccatctctactaaaaatacaaaacttagacgcatgtggtggcatgtgcctgtaatcccagctactagggaggctgaggtgggagaattgcttgaaccagggaggtggaggttgcagtgagccgagattgcgcgactgcactccagcctgggtgacagaatgaaactccatctccaaacaaacaaacaaacaccaaaaaaacgatgctgggatgtgatgcacaaagtcggctgtggggtccactaggaccccagactcggcactgacaccctccttcctgctgcagccttagctccgggcgctgctgctacttcgccgccggctcagccaccaggctgcagttctccgaccaggctggggtgtctgtgctgtacactgtcacactctgggtggaatcctgggccaggaaccagacagagaagtctcctgaggtgaccctgcagctctacaactcaggttagcaccttgttctccccccgtccgttttttacccagagaggccatcaggctgcaaggctggagctagagaggattcctggcccttggcaagggacttgatactactagccattgtcacttcacgtagtgtcacgcaaacactattgtgacaaagcagtctttcatggtccccttaccaatcccctattcgtgggcacttagattgcttctggtttctctctgctagccataatgctgccaagacctggttgggttcttattatctgttctcatgactcgacatcatgtattttgccgggtgcggtggatcacgcctgtaatcccagcactttgggaggctgaggtgggtggatcacaaggtcaagagatcgagaccatcctggtcaacatggtgaaaccccatctctattaaaaatacaaaaattagccaggagtggccacgcgcgcctgtagtcccagctactggggagactgaggcaggagaatcgcttgaacccgggaggtggaggttacagtgagctgagattgagccactgcactcctgcctggcgacagagcaggactccatctaaaaaacaacagcaacacacaaaaaagccaaaaaaatttgcctggtgtggtggtgcatgcctgcaatcccagctacccaggaggctgaggcgggagaatggcttgaatccaggaggcagatgttgcagtgagctaagatcaagtcactgcattccagcctgagtgacagagcaagacactgtctcaaaaaaaaagaaaaaaaagaaaaaagaaaagaaaagaatgaaggaaaacatgtcatttgccacaacatggacaaagctggaggacattacgctgagtgaagtaagccaggcacagaaacaaaaacatttcatgatctcacttacatgtataatctttttttcttttttcttttttttgagatggagtttcgctctgtcgcccaggctggagtgcagtggcgcgatctcggctcactgcaagctctgcctcctgggttcacaccattctcctgcctcagcctccccagtagctgggactacaggcgcccgccaccgcgcccggctaagtttttgtatttttagtagagacggggtttcaccgtggtctcgatctcctgacctcatgatccacccgcctcagcctcccaaagtgctgggattacaggcgtgagccaccgcgcccatcccacttacatgtataatcttaaaaaaaaaaagtcgaatatctaggcaccgaaagtagaactgtggttaccggggatggagagaaggaggaaatgggggagatgtaggtcaaaggaatacaatttgtagttacgcagcacaaataaatctagagttccaaggtacagtagagaactataattaaaaataatgtatattgaaaatttgctaaaagaatagatttaagggctgggtgcagtggttcacgcctgtaatcctagcacttcgagaggccgaggtgggaggatcacctgaggtcaggagttcgagaccagcctgaccaacatggtgaaaccccatctctactaaaaatacaaaaattagccgagtgtggtggcgggcgcctgtaattccagctactcgggatgctgaggcaggagaatcacgtgaacctgtggtatggaggttacagtgaaccgagatcacaccactgcactccagcctgggtgacagagcgagactccatctcaaaaaaaaaaaaaaaaattttaagtgttctcaccacacaccaaaaaagtaattatagaaggtgatggatatgtatatatatttttaagagatggggtcttgctgtgttggccagggtggtcttgaactcctgggctcaaatgatcctcctgtcttggcctcccaaagtgcttcgagtacaggcgtgggcccctgtgcctggccatggatatgttaaattccttactgtagtaatcatttcactatggatatgtatatcaaaccatcatacctcttaaatttatacaatgatataaaaaaagaatcaggccgggtatgaccacggtgcagcaagactattttatgctaatttatgtctctccttgggtcaggttccttgaaatagatctaaaaactaagtacgatttccctgatagttctaaacaaacaaacaaacaaaaaaagaattggctggacacagtggctcatgcctataatcccagcactttgggagcccgaggtgggcggatcacccccaagagacaggcacttttgtaaattgcttaccagaattgattaccctctggcaagcaatttacaaaagtgcccgtctcttcacagccttgccagcaatgggtgttaatattttaaagttatcttcactaacaggatcctgtgtataaatctttattaaaaattatttatttttaaattttaatttaattttaatttgttttgagacagagtcttgctctgtcacccaggccggagggcagtggtgggatcttgtctaactacaacctccgcctcctgggttcaagcgattctcctgcctcaggctcccaagtagctgggattacaggtgcccaccaccatgcctggctaatttttgtatttagtagagacggtgtttcaccgtgttggccaggttggtcttaaactcctgacctcagatgatccacccaccttggcttcccaaagtgctaggattacagctatgagccactgctcctggccatatttgttgtttttttagagacaagttctccctctctctcctagattggagagcagtggtgtgatcagggctcacttcagcctcagcctcctaggctcaagagatcctcccatctcactctcctaagtagctggaaccacagtcatgaactaccatgcctggctaatttttatgtagagatgagggggtctcactatgttgcccaggctggtctcgaactcctgggcttaagtgatcttcctgccttggcctcccaaaatactggaattacagggtgagccaccgtatgtggcttgtgtataaatcttgactttttgatcataatataccaggcttagctgggacctgcaagtgtcccctaattcatatttagggattcagttgcttaccctggacagggtggattttcagggcccattaactcacatacgtgtgggctgcccctcgccaatccctacctctgcttccagttaaatatgagcctcctctgggagacatcaaggtgtccaagttggccgggcagctgcgtatggagtgggagaccccggataaccaggttggtgctgaggtgcagttccggcaccggacacccagcagcccatggaagttggtgagtttgtttcccaagtccagggtggacacgggcctctccagggcaccttcacccccaaatcagtctcaccatctctgcatctgtccccgctcccaaccagcccccactctagcccctgaggtggtttttttctttttctttttttttttctgagacggagccttgctctgtcgcccaggctggagtgcagtggcatgatctcagctcactgcaacctctgcctcccgggttcaagcgattgtcctgcgtcagcctcccgagtagctgggattacaggcatgcgcccactaccacacgcagctaatttttgtatttttagtagagacggggtttcgccatgtgggccaggctggtctcaaactcctcaggtgatccgcccaccttggccttccaaagtgctgggaatacaggcatgaaccaccacgccttgctcccactaaaattttttaaaataaattttttcttttggaataaccttcgattttcagaaaagttactatataaactggtgcagagaacgcccatatatcctttacccaaactcctctaatgttaatgtcttacataaactccaggcattatttgaatgtcaccaatttttccaggaatgtcttttttctgctcccagattcaatccaggatcccacattgtgtttagtaaaataattattaatttttaaaatttagttataataattttttactgctttatatgttcctaaagaaggtttgaacctagagaaggttctctagtaattaacgatagaaataatccctggaagtatggtctttaatttaaaaaaatttagcgaggtgcggtggctcacgcctgtaatcccagtgctttgggaggccgagttggggtgggattgcttgaggccaggagtttgagaccagcctgggcaacatggtgaaatcccgtctctaccaaaaatgcaaaaattagctgagtgtgatggtgcatgcctgtagtcccaactactcaggagactgaggcgggaggatcacctgagccctgggaggttgaggcttcaataagccatgattgcaccactgcactccagcctagatgacagagtgagaccgtgtctcagataaataagtaaataaataactaattgtaaaacagcaaatatttttcagcaccaaaatgcaaaacaatatatgaatatgtttttattctagggcgactgcggacctcaggatgatgatactggtgagaataataatagtaatgacaacaacagctgcagcaaattggcattaattgagcacctactgtatgccaggtccaatgctgaatttttttgtatgcctcttaccctgccccatagttcagtattggattctttccaaattgcaggtggggaaacaaatcacgacttggagggggtgagaagcctttggccaaggtcacgaccgaagggatggccgcagccaggacttgaactgaggggcagggatggacgtgggtgatcctggaggccctaagaggacagggcctggcctgcttctgctgagcccccaggacccagcacgtggctctgtacacagttggagctcaataagcacatgatggttaagtgactggtgccaagtcctggacaattcttacggcctgatgttcgacctgcctctccccagagtcctgcctctgccccctggagatgaatgtggcccaggaattccagctccgacgacggcagctggggagccaaggaagttcctggagcaagtggagcagccccgtgtgcgttccccctggtaagatcactctgagtacaggaacaggggcaagcattagaaataaggcaacagccggaggtggtggtgcacacctgtagttccagctgctcagaaggctgaggcgggaggatcacttgaggccagtggtttgagaccagcccgggcaacatagtgagaccccatctctaaaaaataaaataaaatggggctgggcgtggtggctgatgcctgtaatcccagcactttgggaggctgaggcgggcagatcacttgaggtcaggagttcgagaccagcctggccaacatggtgaaaccccttctctactaaaaatacgaaaattagctgggcgtggtggcgggagcctgtaatcccagctacttgggaggctgaggcaggagaatcccttgaacccgggaggtggaggttgcagggatccaagatcacaccactgcactccagcctgggtgacagggccagactctgtctcaaaaaaaagtaaaaaaaaaaaaaaaagtaataataaaataaaatggaaaaagaaataaggcagcaggtattagaaacaaggtggtgagtgttagaaataaggcagagggagaaatgggtgctcaaaccctgacaatgtggcatccggtcttgctgcacccactttagggttttttgctgctgttttttttgtttgtttgtttgttgttttttgttgtttttttttttgagacggagtctcactctgtcacccaggctggagtgcagtggcgccatctcggctcactgcaagctccgcctcccgggttcacgccattgtcctgcctcagcctcccaagtagctgggactacaggtgtctgcaaccacgcccggttaattttttgtattttttagtagagacggggtttcaccatgttagccaggatggtctcaatctcctgacctcgtgatctgccctcctcggcctcccaaagtgctgggattacaggcgtgagccaccgcgcccggcctactgctattttttgttttgttttgagactgtcttgctctgtcaccctggctggagtgcagtggtgtgatcttggctcactgcaacctccgcctcacgggttcaagcgattctcctgcctcagcctccagagtagctgggatttacaggcatgcaccaccacgcccagctaattttgtatttttagtagagatggggtttcgccatgtttgcccggctggtctcgaactcctggcctcaagtgatcctcccaccacggtctcccaaagtgctagaattccaggtatgagccactgcgctcagcccactacagggctttatcaagtgagaatcatcaggctgaacctcacggtgtctcaaggacaatgtcacctgcaggtggcagggtgtactaaacagctgctgccctgagcctgggcaacaggaaaatgagtgagagggtttcaaaccatgcagaaaggcctggcgctgtggtttatgcctgtaatcccagcactttgggaggccgaggccagaggattgtttgaggccaggagtttgagacaagcctgggaatcaaaacgagactctgtctctagtctataaaacaacagcaacaacaacaaaaccatgcagagaaatacatttgcattcaaaaaggaacttagaggccaggcgcagtggctcacgcctataattccagcagtttgggaggccgaggcaagtggatcacaaggtcaggagttcaagaacagcctgaccaacatggtgaaaccccgtctctactaaaaatacaaaaattagccggacatggtggtgcatgcctgtaatcccagctacttggaaggctgaggcaggagaatcgcttgaacccagaaggcagagattgcagtgagccgagatcgcaccagtgcactccagcctaggtaatagagtgagacttcgtctcaaaaagcaaacgaacaaacaaacaaacaaaaaaccttaggcaacatgagattacaggtggcagttatccctggggatgcaaattgtgttaatttttcttccttcagttttttctcttttctgcaatttggggcagcaagggattttcactttgtaaatgtggagaatccatcatttacaaagaaaacatccatcagtctttctctccttccaattcgtctagttggtttggttctgattgcagaaaaccccccacagcctcaggtgagattctcggtggagcagctgggccaggatgggaggaggcggctgaccctgaaagagcaggtaacggggctgtcacagggctgtggggtggcctgggatggggagcaggaggcaaaagcctaggcgggggatgagcaagtggtagatggagggagatgagatgtagaggtggcaggaagtgggcaaattgtgggtttaactctgaaggtaatagggagccatggagtgtgtgtgtgagcaggagaggcacatgactggactcagatgttcacagactttccctggctcctgtgtgagaaacagagtgtgggggaattgcacagaagccagaaggccaggaaggagataatggtgactgcatttgcctgggtagcagattattgctttaagtcccaaaacaacccattaagtgcagtctgattagtttacagagagggaaactgaggcatagagggagtatctctgttgagacaaaactgacaaatactccactcgttgactttaccatagtcatcttagtcaggtccctaatgggctgttactataaggctgtagcaaaaatcctttatttcctatgttcctctaactcaaattcctcttcttttttttcctttttttttttttttttttgagatggagtcttgctctgtcgcccaggctggagtgcagtggcgccatctcggctcactacaagctccgcctcccgggttcacgccattctcctgcctcagcctcccgagtagctgggactacaggcgcccaccaccatgccgggctaattttttgtatttttagtagagacggggtttcaccgtgttagccaggatggtctcaatctcctgacctcatgatctacccgtctcggcctcccaaagtgctgggattagaggcgtgagcccccgtgcccggcctctcaaattccttttctaaggaaaaattttctgcttgaggtaactgggttaaaagatggaaacatttttgttttcctgaatgtcagtgggttttgtcaatttcccacctccctcaagctagatgtgtgcgggaggtgaatgcctgtctcacagcagctttgccagcattgaggtttattattcttttaatttttgatgcatgttattggctgtggcctttgtccaagtctgtcttcataggctgtgccctgctgtctgcctatgggatgatgagtgtgatcaggtacccacaagctgtctttcatactcctgacagccaacccagctggagcttccagaaggctgtcaagggctggcgcctggcacggaggtcacttaccgactacagctccacatgctgtcctgcccgtgtaaggccaaggccaccaggaccctgcacctggggaagatgccctatctctcgggtgctgcctacaacgtggctgtcatctcctcgaaccaatttggtcctggcctgaaccagacgtggcacattcctgccgacacccacacaggtgcctcctctgggtggggagggcggtatgagggcccctcagagctgagcacctactctgagcctcagctagaccagggtgagaggagcgaggcagaaaattttaaaggagtgcctgatttaggggtgtatcaaaaattcagtaatcagccaggcacggtggctcacacctgtaatcccagcactttgggaggctaagacaggtgaatcacctgaggtcagcagttcgagaccagtctggccaacgtggtgaaacccagtctctactaaaaatacaaaaattagctgagtgtggtggctgtagtcccagctacttgggaggctgaggcaggagaatcgcttgaacccaggagccagaggttgcagtgagccaaaattgtgccattgcactccagcctgggcaacaaagagcaagactgtgtcaaaaaaaaaaaattcaataatcaagatccataatgcagttttttgttgttgttggtttgttttttttaagagacagagttttgctatgttgcccaggctggacttgaacttctgggctcaagcaatctttctccctcagcctcccaaatagctgggaatataggcatgtgccatcatacctggctattatgcattattaaagaacaacaacaaaaactagctgagccactgcgctccaccctggttgatagagctacactctttttcaaaaaagaaaaaagagagaaagaaagaaaaaaggctagagttgaccctgtgtttatttaagatctaatttcttttttttcttgtgacagatggcatgatctcagctcactgcaacctccgccttccagattcaagagattctcctgcttcagcctcccgagtagctgggattacaggcatctgccaccatacccggctaattttgtatttttagtagagacggggtttcaccacgttggccaggctggtctcgaactcctgacctcaagtgatccacctgccttggcctcccaaagtgttgggattataggcgtgagccaccatgcccagcctaatttttgtatttttagtagagatggagtttcaccatgttgcccaggctggtctcaaactcctgccctcaggtgatccacccacctcagcctctcaaagtgctgggattacaggtgtgagccactgtggccgacctactatttttattatttttgagctaggttctcagtctgttggcagactggagtgcaatcatggctcactgcagccttgaactcccagactcaagtgatccttccacctcagcctctggagtagctgggactacagacatgcaccaccacacctggttaattttttatttttattttttgtagagacaggtgtctctctacgttgcccaggctggtctcgaactcctgggctcaagtgatccacccatctccacctcccaaagtgctaggattacaggcgtgagccaccgtacccagcctggtcccatatcatagtgaaatggtgcctgtaaagctctcagcattggcttggcacatgcagttggtactcaataaacggctgttgctatccccagaattgcaagcagtatccatctctctgacattcatgaagacgccctggcgggagggagtgggagagatttgcccagggactgagtgggtgtgtgctcgtgcttctgagtttggcatgagaccaccagtggcgccggtcaggccagggaggcctagtcttgcatcacactctccgcctaggctaggcaagtggtgggcagccaggtatctgccacagccggagacgcctacaaggctggaagtgggtgtaatggcagtacaggaagctctcatggtgaatatcctggcaaggagacagcagttaggctggaggaggactcagctcattcaaacaccacctgctgactggatgcggcggattatgcctgtaatcccagcactttgggaagccaaggcaggtggatcactggaggtcaggagttcgagaccagcctgggcaacacggtgaaaccccatctccaccaaaaaataataataaattagccaggaaatggtggcgcatgcctgtggtcccagctactcaggaggctgaggcaggagactcatttgaacccgggaggctgaggttgcagggagccgagatcatgccactgcactccagcctgggcgacagagcaagaatccgtctccaaagaaaaaacaaaaaaaaacaaacgccatctgctacccactttgtgcctggccccaaggcagcctccagtgcagggaaacagccaaacacagacacccctggccctgtagggtcaggggtatagacgagagggtgggagagaggctgcaggagccagagaaggggactggggagagagatggcaactgtctcgatgcgtctctcccctctccttccagaaccagtggctctgaatatcagcgtcggaaccaacgggaccaccatgtattggccagcccgggctcagagcatgacgtattgcattgaatggcagcctgtgggccaggacgggggccttgccacctgcagcctgactgcgccgcaagacccggatccggctggaatgggtaatggcctggaatggcctgcgcctacccctcctctgtgccctcccttttaggtcctggtgggttcaaacctgcagggaaggcacacagcgggtgtctaaggcccagagaggtgttgctgcttactcaatgtcatacagaggtagggacagggtgaggttcggagcctctcacccatatgggtctggaacctcttgctggcatcctgagctcagttccaggcagatcacacacatacaggtaatgaatctcacatcccaaggtgtttgttaaatattcaaccgcgccagggaaggtggcagttcgcgagatgctggtggcaaattaatgagcagtctttagggaaaggggggccgtgaggctcaggtggcctctcactctcccgcttcctgctctgggccttgccagagccccagaaagcctcagcctcagcctgttccttgaagaatacacagcctgaggagacagaactggacacggaacccctgaccccattgtccgggcaaggtggctaacacctgtaatcccagcactttgggaggctgaggcaggtggatcaacagaggtcaggagttcgagaccagcctggccaacatggagaaaccctgtctctactaaaaatataaaaattagccaggcatgatggtgtgcacctgtaaatcccagctactcaggaggctgagacaggagaatcgcttgaacccgggaggcagggattgcagtgagtcaagattgcgctattgcactccagcctgggtgacacagcgagactccatctcaaaaaaaaaaaaaaaagaagccctggttccatggagtaagggctgggttagagggggatggggatggggttgggggtgttgcatagggaagagatcttggaggaggggatattggtgcaagggctttgaaacatgagtaggagttttctgggggttcctggcagatggcacagccagtgcaaaggtgcagaggtgggaacacaatctactgaatggcctggcctttgcttatccttccagcaacctacagctggagtcgagagtctggggcaatggggcaggaaaagtgttactacattaccatctttgcctctgcgcaccccgagaagctcaccttgtggtctacggtcctgtccacctaccactttgggggcaatggtaagtgacccaaacctgcaggtttacattattttttctttttaaataatttaaaaaaatagaggctgggcacagtgactcacgcatgtaatcccagcactttgggaggccaaggtgggtggatcacctgaggtcaggagtttgaaaccagcctggccaatgtggcgaaaccctgtctctactaaaaatacaaaaattagccgggtgtggtggcgggtgcctgtaattccagatacttgggaggctgaggcaggagaatcgcttgaacccaggaggcggaggttgcagtgagctgagatcatgccactgtactccagtctgggtgacagagcaagactctgtctcaaaaaaaaaaaaaaaaaaaaaaaaaaggacaatgctgttaaggcagacagaatggctcacccctgtaatcccagcactttggcactttgggaggctgaggcttgtggatcacttgaacccaggagttcaagaacagcctgggcaacatagcaagaccccgtctctacagaaagaaaaaagtttgccagccatggtggcatgtgcctgtagtcccaactactcaggaggctgaggtggtaagatcacttgatcccaggagtttgaggctgcagtgagctatgattgcaccactgcaatcatacaacctctgcctcccgggttcaagccattctccttcctcagcctcctgagtagctgggattataggtgtgcactaccatgcctggataattttttgtatctttagtagagacagggttttagcatgttggccaggctggtctcaaatgcctaacctcgtgatccacctgccttggcctcccaaagtgccgggattacaggtgtgagccactgcgcccggccagcattgtccattttatagataagaaaactgaggcccagggaagggaaatgacagtgactgagtggcagaaccagaattaaaacccagctcacctgactctgtggccaatgttacctccgtctctggacagtgggaggctgggcattcaggaagtgctcaaccagcactccttttttttttttttttttttttttcttgagacagagtcactctctgtggcccaggctggagtgcagtggcacgatcttggctcactgaaacctctgcatcccgggttcaagcgattctcgtgcctcagcctgccgagtagctgggattacaggcgcccaccatcatgcctggctaatttttgtagttttagtagaaacagggtttccccatgttcctcaggctagtctcgaactcctgaccttaagtgatctacccaccttggcctcccaatatgctgggattgcaggcatgagccatcgtggctgggcttttttttttttttaaagacagggtcttgctctgttgcccaggctggagtgcagtggtgccatcttggctcactgcaacctctgcctcctgggctcaagtgattctcctgcctcagcctcctgagtagctgggattacaggtgtccgccaccatgcctggctaatttttgtatttttagtagagaaggggttttgccatgttggccaggctggtcttgaactcctggcctcaaatgacttacccacctcggcctcccaaagtgctgggattacaggtgcgagccactgtgccaggcctcgaccagcattcttggtgttgactatgacaatggtactggttgcagcctcagcagctgggacaccgcaccacgtctcggtgaagaatcatagcttggactctgtgtctgtggactgggcaccatccctgctgagcacctgtcccggcgtcctaaaggagtatgttgtccgctgccgagatgaagacagcaaacaggtgtcaggtacgtgaggcagtgcagacctggcttggggaggaagggaggatcctggcctgtgatctctcttgctgtgtgaccctgggcaccttgccgtccttctctgggccttggttatcaaacccttaaaacaagagaattggctgggcgcagtggctcacgcctgtaatcccagcactttgggaggccaaggcgggcggatcacctgaggtcaggagttcaagaccagcctgacaaacttggagaaaccccgtctctcctaaaaatacaaaattagccgggcatggtggcacatgcctgtaattctagctacacgggaggctgaggcaggagaatcgcttgaacccaggaggcggagattgcagtgagccgagattgtaccagtgcactccagcctgggtgacagagtgagactctgtctcagaaaaaacaaaaacgaaaacaaacaaacaaaaaacaaaaacaagagaattagacttgagggtctttttttttttttttttaattttatagacagggactcactctgtgcccaggctggagtgcagtggtgccatcatagctcacagcagcctcaacctcctgggctcaagcgatcctcccacctcagcctccctagtagctggaaacacaggtgcacaccaccatgcacagttaatattttattttttgtagaaatgaggccttgctatattgcccaggctgggattttttcttttttttctttttgagagggagtctgtctctgtcacccaggctggagtgcagtggcgccatctcagctcactgcaacctctgcctcccgggttcaggcaattctcttgcctcagcctcccaagtagctgggattacaggcacccaccaccatgcctggcaaatttttgtatttttagcagagacggagtttcaccatgttgaccaggctggtctcaaactcttgacctcaggtgaatcacccgccttggcctcccaaagggctgggattacaggtgtgagccaccgtgtccggcctcgctcaggctggtttcaaacttctggcctcaaactatcctcccaccttggcctcccaaagtgctgggattagtcatgagcacccagctgaacttgagggtctcgatcaccccttgcagaccctggagaaggctgggtgggcaccagccaagtgcttatggtgtattggattcatccatgggaagctgcccctcacatgtagcagcagctgaactctcatcaagcagggatgactgtctccattccacagatgaggaaactaaggcctggaggggggatctgatgagggacaggaaagcccacaaaacagggtttagccaggagggtttttggctttccccaggaaagagttcaagtgcatgtcggtggtgttagacagaaacttttactgaagtggccgtgtagagcagcagcagaagtcctgctccttgcagagtggggacgccccacaggcagggcagctacgtctcatatttatacccgcttttaattatatgcaaatgaaggggcggtttatgcagaaatatctaggatgaaggtagtaacttccgggttgtgggatcattgccgtggacaggggcggtaatttccgggtgttgccatggtaatggtaaactgacatggcacactggtgggcgtgtcttatggaaagcccaggacctgctttagctagtcctcagtttggtcctgtgtccaagccctgcctccagagtccaatcctgcctccaacctcagatccacctgcccaaagatccaacaagtcagccggacgcggtggctcacgcctgtaatcccagcactttgggaggctgaggcgggcggatcacttgaggccaggagttcaagaccagcctggccaacatggtgaaacctcatgtgtattaaaaatacaaaaaattagctggctatggtggtgggcgcctgtaatcccggctactcaggaggctgaggcacaagaatcgcttgaacctgggaggtggaggttgcagtgagctgagattgtgccactgcactccagcctgggcaacagagtgagactccatctcaaaaaaaaaaaaaatcttgagatgaatgggcgcattaagagaagagattttaggttgggcttggtggctcacacctgtaatcccagcactttgggaggccgaggtgggcagatcacgaggtcaggagatcgagaccatcctggctaacacagtgaaaccccgtctctactacaaatacaaaaaattagctgggcgtggtggcgggcgcctgtagtctcagctactcgggaggctgaggcaggagaatggtgtgaacccaggaggcagagcttgcagtgagccgagatggcgccactacactccagcctgggcgacagagcaagactccgtctcaaaaaaaaaaaaaaaaaaagaaagaaagagtagagattttagcaaaatgcctatgaatccccaccccacccacaggctgtggtagcccagcctggcctctgaggagtaaagaggtcccaggactcagggttgcctctcccactgcagagcatcccgtgcagcccacagagacccaagttaccctcagtggcctgcgggctggtgtagcctacacggtgcaggtgcgagcagacacagcgtggctgaggggtgtctggagccagccccagcgcttcagcatcggtgagtggagggggtaggacccagttatttacccagcatgcactgcactgcgcttcccacaatgatcttagcagccctgccctcactctcactccctctatggctccctactgccctcaggagaaagtagcagctcaaactgctcccattgccttctctcgcagcttcctctcacactccaggagccttgcccatgcaggcccttccctgcctcctgcctggaatgtttgttttccacacggtccaactcctattcgtccttcaaaactcagctcaaaagttccctcctccagcaagacttctctgcctccttctggccatgcccttgtttacaactgtcccttctccctggtctgacactgcggggttggggtagatgtgtcaaggtatctgggggctcttggggaggaggaagatgcaggaatctgttcattgagcgacaaataaatgaatgcaaaaataaggaggacacaggcaaaacccggtgtggtggctcacacctgtaatcccagcactttgggaggctgaggctggaggattgcttgagccgaggagttcaagaccagcctgggcaacatggtgagacctcatctctacaaaaaatatttttaaaatagtggggtgtggtggtgcacacctgtagtctcagctgctcaggaggctgaggtgggaggatggcttgagaccaggagttcaaggttgcagtgagccgtgactgcaccactgcactctggcctgggcgacggagcaagaccctgtctcaaaaaaaaaaaaaaaaaaaaaaaaaaaaaaaaaaatagaagaagaagaaggagaagaaagaagaagaagaggaagaggaatagaagaagagggaggaggaggaggaggaggaggaagagaacaacacaggctctgttgtcgggtgcatggttataagagattcagagatcaaatgatccctgttcatgccacggtgtcctttcagttccaagagaaccaactggaacccagagaacaaaagagtcagggttggtggggggcaggcaggcctgggtccaggggcagccacatgtgccctatgtgcaggctcctggaattacagagtctttttttatctttttgagacagattttccctcttattgccgaggctggaatgcaatgatgcgatctcggctcactgcaacctccgcctcccgagttcaagcgattcttctgtctcaccctcccaagtagctgggattaccggcgcacaccaccacgcccagctaatttttgtgtttttagtagagacaggtttcatcatattggtcaggctggtctcgaactcctgacctcaggtgatcagcccacgttggcctcccaaagtgctgggataacagtcatgagtcactgtgcccggcctggaattacagagtcttgaacacttcctgcatgccaggcctttatttcttgacagctaccgggcaggtgggttctgtggtctcccagtgagaagcccgtggcatgtgcaccaggatcagcagcaagttcatggagaaaccaggccctcctagctccttccctgaggaagaggcaggaggtagccctctgccaacccacgctctcccacctcagaagtgcaggtttctgattggctcatcttcttcgcctccctggggagcttcctgagcatccttctcgtgggcgtccttggctaccttggcctgaacaggtaactgacacctcttaccgttaccatagcgatggtaatgatgctgggcaggggagccctaaagtggagcttagcccgcagattgggtccttggctttgcccaggaaataattcaagggcaagccagaggtagaagaaaacagctttattgaagcagcagttatagctccgtgactgcctctgcagagcagggcttccctgtaggcggagagtagccgctgagagcggttttgcagtcagatttatacttacttttaattgcatgcagattaaggggggcagtttatgcaaaatttctttcttttttttttcttttttgagatggagtcttactctgttacccaggctagagtgcagtggcacgatcttggcttattgcaacctccccctcccgggttcaagccattctcctgtctcagcctcccaagtagctgggactacaggtgcgtgccatcacacccagctatttattttgtattttcagtagagatagggtttcaccatgttggccaggctggtcttgaactcctgacctcaggtgatcctatgcagaaatttctagggaagggatagtaacttttgggtccttggtcattcccatggaaaggggcggtgacactggtgggcatgtctgattgaaagctgctttcaagccgggcacggtggctcactcctgtaatcccagcactttgggaggctgaggcaggcagatcgctttaggccaggagttggacaccagcctggccaacatggcgaaacctctctctaccaaaactacaaaaattagccgggtgtggtggcacacgtttgtaatctcagctactcaggaggctgagtcaggagaatcgattgaacccaggaggcagaggttgcagtgagccgagatcgcgccactgcactccagcctgggcaacagagcaagactccgtctccaaaaaaaaaaaaaacctcagctcctctcactggtcccctttcctccccagggccgcacggcacctgtgcccgccgctgcccacaccctgtgccagctccgccattgagttccctggagggaaggaggtaaggatgccttttctaattccaagtctttttattgggtgcacatgctggacaagggttacgcattagctcattttattctctcccaattcatcaaggtaaggactccaaaaccagtgctccataccccttcccattttaaagacaggcaggcagaggtccatttcctggcactagaaacagaattcaaagtggctttattataaaggaaacctgatggaaaaaatcccaagggaatgggcttcagatatgcctgaatccagcgattggggtctatctcggagctgcccgttcagggttcttccgcaggcaggctgagccttctctgattggaagcagggtgtccattttccccattaactggggcaaaagtctcagggccatcactgattggtccagcttgggtcacatgcccttccctgagcctatggctagaaccagaggggtagggaagggtctgatgggtgggctggccagggtcacatgaccattgctagagctgaggtggggtcactgcactgtcaaccacaccatctgtgaaaagagggagggaaatttcccaaagacagatgggagtgctcttcctaagaggggctgaatgggagtcagtgcggcagactccatcctcaaatcggtctcaggatatatggagtctcgctctgtcacccagcctggagtgcagtggcgccatctcggctcactgcaacctctgattcccgggttcaaacgattctcctgcttcagcctcccaagtagctgggattacaggcgtgcgcaaccaagctcagctaatttttgtatttttagtagagatggggtttggccatgttctccaggctggtctcaaactgctgacctcaagtgatccacccgcctcagcctcccaaagtgctgggatgacaggtgtgagccactgcacccgtccaggtctcaggatgttagagaatttaaccagcagtgacctggtccgttccatcctgctgtggatgggaagtagagctctgctcacagctgtggccctaccctccctctgcagacttggcagtggatcaacccagtggacttccaggaagaggcatccctgcaggaggccctggtggtagagatgtcctgggacaaaggcgagaggactgagcctctcgagaagacagagctacctgagggtgcccctgagctggccctggatacagagttgtccttggaggatggagacaggtgcaaggccaaggtcctggggcccagtgggccagacggtcaggggtgcaaccctgcccggggggtgggggggctagacatccatcgctcctgggatatcagggcctggaggcctgagggagaaacgaaaacatccactttgtcttacagacacgaagagcgactatctcaatcacaacggctggttattaagcacttatggcatacccagcccattccatccactcacatgattccctaccaaatccctacaaccaccccctgaaaggaaccatgactgttgtactttacagatgtgatcgttgaggctcagagagggtgagtgactcgcccgaggctacgtagcacacacaggagtcacatttggacccaaataacccagagctcctccaggctccagtgcacctgcctcctctctgccccgtgcctgttgccacccatcctgcgggggaaccctagatgctgccatgaaatggaagctgctgcaccctgctgggcctggcatccgtggggcaggagcagaccctgccatttacctgttctggcgtagaatggactgggaatgggggcaaggggggctcagatggatccctggaccctgggctgggcatccacccccaggagcactggatggggagtctggactcaagggctccctgcagcattgcggggtcttgtagcttggaggatccaggcatatagggaagggggctgtaaactttgtgggaaaaatgacggtcctcccatcccaccccccaccccaccctcacccccctataaaatgggggtggtgataatgaccttacacagctgttcaaaatcatcgtaaatgagcctcctcttgggtatttttttcctgtttgaagcttgaatgtcctgctcaaaatctcaaaacacgagccttggaattcat

SEQ ID NO: 161 - DNA, 81736 bp, Homo sapiens
ccgctcttgctgagcccagagccatcccgcgctctgcgggctgggaggcccgggccaggacgcgagtcctgcgcagccgaggttccccagcgccccctgcagccgcgcgtaggcagagacggagcccggccctgcgcctccgcaccacgcccgggaccccacccagcggcccgtacccggagaagcagcgcgagcacccgaagctcccggctggcggcagaaaccgggagtggggccgggcgagtgcgcggcatcccaggccggcccgaacgctccgcccgcggtgggccgacttcccctcctcttccctctctccttcctttagcccgctggcgccggacacgctgcgcctcatctcttggggcgttcttccccgttggccaaccgtcgcatcccgtgcaactttggggtagtggccgtttagtgttgaatgttccccaccgagagcgcatggcttgggaagcgaggcgcgaacccggcccccgaagggccgccgtccgggagacggtgatgctgttgctgtgcctgggggtcccgaccggccgcccctacaacgtggacactgagagcgcgctgctttaccagggcccccacaacacgctgttcggctactcggtcgtgctgcacagccacggggcgaaccgatggtgagtagagttggactgatgcgccctcagcagctcagagcggcgtgagaatggcgccctagggattccctgcccgattcaaactttcctccctcccaaggaggcaggagggaaacgctgcgagagccagctcgctggaaatctgccagggaaactaacttatcttggggcggcagcgccccgggtgcgttatggtgcaaggtcttggagcttcgagtcgggggtggtgggcggaggaggaggtggggaagctgccctgctgcggactgcacatctgtggcgacagggagctcagtgggcagcacagctcacgtctgagcgcacgtgcacgtgtctcgctttaggctcctagtgggtgcgcccactgccaactggctcgccaacgcttcagtgatcaatcccggggcgatttacagatgcaggatcggaaagaatcccggccagacgtgcgaacagctccagctgggtgagttgggtatgggaccaggagttagtgacctcccgaccccccatgtggaccccaccatagggcaagtcctggaaagattcacgttgcctgttacttctggtttaaagagcataaagttttcagtttcaactccatctcatcttgcctccttaatataaaagggattccctttctgttaatatcgttctcccttttccttatggcaatgattgcagtactctgacaactatgctagagaaatttcttatgataccttctcttcatctctccccgtctctccgtgtgtaaagcacattttagactctctcagcgtattaaggacaggatccagctaagccaagacttgagaattttatttccatctttgacctatcaaccctcttaaagaacaggctaaggagcatatcaggaatagcaattggaattgatcccatatcccgtcgtttaacctaaaggcctaaaaaaaaaagtgatagttttacttacaatatacaatctaaaagaaaaggaaaattggcatcttcatcgttaatgtagtataattttccattcccaaaaccgtcatccaaaactcatgttatatgggtccatctttttgcagtcatttctcaatgtctcagatttgtgacaagttgaaaaatgtgtactgatagaggggagaagtttcatgtttcaaagccaaagacaagtttgttgcacacaggcaagtggggaaagaggaaggaatattaaataacaagacctatcttgttccaaagtgttactgctatatatattgcttaacttttttccccttaaagcaaccctgggtcatggttgacattgttcctagtttatgtatgaggactgtggctcagagttgcaaatacctttttaaaagttacttagctagtgactgataggtgggaactaaagtcaaactagggtctgaatgcgtccaaagtctaagccattttcttccatgtatgtatcttcaatgcaaataaaattaagtgaatggtttaatatgttgtctgctgagctgatgggtcatctgtaaacggtgaataaaattggtacttctttatatttctttgctataaatggacttttgagattagttattggatctttaacttcttttgtattttatagtagtctttgctctttttcaaactgtgaagctggttcccttcattcagatgaattcagatagagtataaacataatggaatttttacttttaactcagagcacctataaaagtctacgagttgtctgtagcatgtagaataagccctagcctcttgttaagcatcctcaataccagaaatcacagtaggaatgcataaaacattcacagacccatacattttggaatgattttgcaaagcataattttcattgcatgagagagttgtgggtgaagaattagggagtggagccgacaactttggtctgccagaggatcttggcaaggtctcaggagggagcaattttatttctgttgtcctgtcatagtttcctgatccatgacattataactactgatatttagtgcctacttcctgtctggatggacactgaatctatttctggatgtctgtgtttaactggataaatcatgacataatactgtattaaatttaagataatgcctgtcaatggaaggaaaaaattgtttgggcatgtgtagcatgggagttgactgttctcagagaaatgtaaacatagtagatatgtcatagatatgaattaaatgaagatcttttggatggatgaatgaataaaagtggagtgaaaatttatcaacctgactgatgagtaagataattgattagaaatgatgagccaaactgatttttaactttcaaaattttggccaatctacaaggtatttactgggatgaaaggaaaaaaggcaagattcctagtcagtcaatgagttaaaacattaatagtgatagtaatgccttgagtatttgccgaagagttgactgaagttatttctcatgtaacattctaaagaatacagatatcttttattcctcatgtaaagaaactgcctctctattcagaataaattcagtggtagcttgaagctataaaatagggattgaggctacagtctagaaataaaacactaaaaacaatacattggtaataaagataatttaggattcttaggtttgtgggctatgcactattttgtatgaagaagtttcaagagtgtgtgtaaatatatataagccatcttctgtagaagagtgtgtgtgtgtgtgtgtgtgtgtgtgtgtgtgtgtgaatcttctgtataaaatagcttcagttgtcctgtttcaaatgtgggtgactctaatgtttcaaaaatgcttagctcagtactgacacataatacattcaaaaaatagtggttcttctttattgtttacttaaatctattatctgtatgttatctgtaacaagcaggctgaggttaatagggacaattgataaactgaaccaaaagtttaaaaattaaaaggtaatacattaaaaggtagaagttgaaatgaaacacaatgagaaatttttgttggctgaagaaaaaaatgttataatgattaaagatcgatctgtgattgccatgtcagtaaggtatcttctttcctttggaatagctttacttgctatcaagaacctgaaggtgtagggtcttcaaatggtgcccatctcccacacaattaaaaatatccacatggactagtctttgagtctctgtagaatttcagatcagtggttgattcagatagactcctcccctcaaaagagaaggtccatatctcgcctaccctaccctctgtggacaaggtgtcccatatggtatattcatgccataagcagaagtgagcctgcctgtttatctagaatgcccagggtgagagacgttaggcatgagataccccttttagtcaagcaagttgactgcagagccagcaccaagagagttgcctggatagtaccgcaaggtgcttttcttcctgcatatatattgttggcctccttttacctccctgactccccaagagacatctcttctctcacttcttttgtaccagaggaaagtggtctctctgccaggagggtctgggcccagacttgctcgtgaagactatatctgaggagacccaggtgatttctacatgtccactttccacccgggcactctgcatcatcaggcttgtttaaaggaaactttaatcacagctggttcctaaattaaggtgtcacaaataatgactcaattaatatagttaagcatagtccatccatggactatcaatattcaaatagaacataataaaacatagaaatgattatcaaattacactaaaaagatggtctttatttggttattcaaatatgtttccagatctttcattactttggagttaccactgaaagcattatacacacactaactctcatttgggtaatagtctaaagttatacaattacactatccagtatagtatccactaaccacaggtggctttgaacacataaaatgtggctagtcagcgatgagagggctgtaatgtaaattacatactggcttttgaatacttagtataagaaaactcattaatttttatgatatatattgaaacaaacactttaaaattattgattacataatattttggatttattaggcgaaataaaattttaggttaaataaaattaattttatttttacttttttcatgtggctattataaaatttaaaatttccaatgggcttgtattatatttctattggacagcactgctgtagagaaacattaagttctctgtgtaaaaataacgctatctctttaggagatgctttcctgatatttatgcataaatgagtagaactttcactttcttttctagactaagtgttctatagttactgggccttcaagctgcctgcctgtccctctcttacaggaaagacccatctcaagttagtcaccattacccatatttagatttctttctggaaattttattaccttagccagcctcctggttcatattatataacctatttgaaagaatttaattagcattgcattattaaactaatgattacctaatcctcacttctacttgattcataggagttattagcttaacattaaatagcaaatatctcactgttgaaacttcaaatatgtttttcttgataactttttactttttcatttgcaatgtgctttaaattgtagcttatgaagctgagattgcagattggtcattttgaaaaatcatccctgaatgaaggctgttatacaattatgtagaaaatcaagacagagagcttcactaataaactatcaggttaccagaaagaagtttccttatttccagcagtttcccaaactttatgtcccaaaaggatgaggtttccacctaatttgagagatgaggctttctaaatgcactttagtttttgccttaagtttacttggtcactgagtgatatacccaatgacttgaaaatatatccccttggcaacagttctagggtcagatgctgaaatccgttgcacatgtgggtaatttatccattcagttgttcattgagggatgcctaagggcctgaacctgggcatacaaaagaaacatactccttgtcccaaaggctttaaagtttataagataggttattataggaaagtatggtgagatttaatctaggtaagacaataaagtgatgcattcctgaagaattggtgttcaagtgggggaactgaaaaataatcagaagttagccagaggaagaggctatggaaaagtttgccagaaagagcaaactgtgtgtataaagaccctgaagtctttgagagcacgatgcttttgaagaactaaaaattgtgtacagttgcactatggagtgtgagctaaactgtaggttagagaggcaggcaggaattacttctgatacaactctaagtatgaatttaccctaggatatttaaaactggggagtgacatgatcagatttgtgtgtttgacagattctctggttgcaggttagtgaatgctttggagtaactgggtcaagactgaaggcaatgaggcagttgtaggaagattttgttataatttagactacagatgacaagtgtctgtacaaggacactggcaatagcagtggagaagaacatggagattctgaaggtatttaggagatagcacttggtaattattgaatgaaagagatgagtgagaatgttccaaagatgttactgaagtttctaatttgggctgtgacatggatgatgatccaatatactgaaaaagggaagagcagcaggttttctggcaaaatgatgagtttcgttggcttgagattcctgtgagacatagaagtaaaaatctagtgatcagttctatgatcagttccatgtatgggtgtggtagacagtagagaggtctgtactagcaaatcagaggtgagtaattgacgtaaccccattcacctccaaggctttgattaccatctctctggggtaaatagatcaaatggccaatggcaaatttctaaggattcctacagttcgagaagtgattagaatagtgctgctcaagtctggctgtaacttaaattctcatgcagagcttttaacagttctggtggcccatctcaaactactagaatctctggggtaagtctatagggcaccagtagtttccagaggtccccagatgattccagtattcatccatgcttgagaaccgctggagaagaaaagaggctgaaaaaaaggctaagagggtgaagccaaagaggtagcaagaaaaatcaggtcaatctgacattaacctgattaaaggaagagagtgttttgagaagaggtgagtagttggcagtagtaaaggttgccaagacatcaaccagggtggtaaattatgaggtctcattagatttagagaattagttcattagtaacctcggtaagacaagctttaatggtgaatccactgcagagggttgagaagtgagaaacaatagcaagcgtcaataacttttaactgggttcttccttcattaatacattttattgattacttatgtattggaaatacacagttgaataaggcatggttaaagcccttgagtaactcagttgagatgatgggagagacaggtaaatggacaattaattatgagataatgtaataagcatgacaatagacaggtacatagtgatgagaagaaatgaatgggagaaggcttcctggaggagtgaaatctgagtagtggacccagttctgactggttttgaagagcacatgtaagggctcaataaatgtgaaataattttcatctttttcacatttgggcaaaatcccctgggatttgctgcacatttcagcctcattccaaagtgtctaggtccgccttgggttccaaagactcatatcaggtagttcagacagtaacacctgctcctgaaatagggagcttggaaatgactgtctttaaaagcagggatttttaattttgagattagctggaaacatcaaattagaatatggaagtggacatacaggtgacaggtctgggctcagtgtgcttgttctcattttacctctgagaatttttaaaaatcatagaaaatcttttttatataaactatgtaaaacactataattcacaaaaatgttcagaaaatagattgtagacttagttctaaaaaccccttttatgggactccttgtgtgcagtggattagacatgttcttttgacattatgccctgtgtagaaaatgctggtcaatgtgcaccatctgtttgtgaatcccttcaaggtctacctcaccacaataccagtctgttttcttgcggaagttttctagaagtcattagactacaatcattttgtctgccagtcattgtcaatatcacattttatcctttaaactctgcccagagaaacgtcctttgatatctgtaactcctcatctcattctgatcctctattggccaggataatatgatacattcctcactggtttttctcatgtatttttaagccttcctatcttcctgacctcctttaattctttcattgctgtctttttttctttttctttttcaaccatcctaccctgtggattccaaaaccaagcatggaactttaatactgaccaccaagcatatttccctggagtattttctgtttacatttttgtattttcttgtttcaaagatagacaaagtggcatccacacattagtgattgtttttcaaatgaatttttaaatccaagagattaattgaaaaccatggaggttcagaattttctttccttattttctaatgttagaggtttaaatatgctcttttaataggttgtttcagaatagtataggtttattcaaaatgtccatagttgaaaataatggaaaagtactaacaactaattgtctggcagcatcagatggtggttgatagtgtgagttttaatcccttccttccccacttacaagtggtgtgaccttgggcaagtgcttagtcatcccttgtttcagattctgcatccataaaattgggatgataatagtattgtctacttcatagggatgttatgaaaagtgagttaatacatgtctttgcatgtattaaaactgtggtacgtagtaagcatgcaataagtattagtaattagagactaactttccctctttaaattatgcttacaaaatgtatcagctggggcacatttttcagctttagttattaaaaagacttgcgtacgttttctgtgggattttgaagaagtcctggcagagaccccaaacctaaaatcaaacccagaagtgacctagttgttagagttctgaggcctcatgatgactcaggatcagcccagatttataaaattgcaaccataaagcttggcactactctctggggacatttacctcttgaactctttctaaatagaatagaataagataaaaaaaaatagctgaaataactggctttttcaggactacaattatataaactgtttctcacataaattgagcatgattattggccattgtgagattttatttaggcaatatgaaaagatgacatttaaacacatttttttaaaaaaacatactttgagaatggtttccaactttgatgttttgctcttttgactcttattctccactagactagctggaggaaaagagttctagaagtttggtacttttatgtcctgtatcacctctaaaacccaaggatattttactttccatcacccaaaattatttttattgtagaattcataaacatcattatcttttagaaacattgccaccaggtttaactagatgtgtgaaaagagtacatagtttaatatagtcaattattatatgaattagtattaatggatttagtaagtattaggacttaaaaggaaaaactaaattaaggggccattttaattaaaaagctaaagactgctgatcaattcttgcagcattgtgagcgccctctgctggctcagttcaaagcaccataatgcacgtaccctgaggagcagaggcattgattatttattgaccacctactaggtgccaggcattcttgcatacacaagcataagttttctgtcatcctcatagccctgcaatggtaaattttgtcatgttctcatatttgaattgattttctcacttttaatatatttttcctaatctgaagttatgtgagtgaagggattatatactttaattattgcttttataaaaaatatcttgaatgaatgactctttataaaatatggaattggaacaagggtcattcatgttttaggattaagaaaaactttagagtggaacaatttgaaatgtatgggttttgtcttacaatggaatagagcttcagcttaaaaaaaaaagacagttggtggaaggtaagggcttttactgcttttctgaaacttcacatcacatcatgagttttgaaagatcaggtaagtatatatgttgtcttagtagccagaaagccagactgagagccccagtcaaatgtctgaattggtggggaagtgacagtacgatgacgcaggtagataaagcaggcatttacttgcattagaaagtcccaagctctcctagccaaaaagtatttcactagcactgtcaaaagttatatagaaagaagaccttagagtctgaccttttccctggtccttctttctttagtggaaatgccaaaatactgagaaccattctaaatggaggaaaagagcagggcaagatagggaacaagtaagtgacctttttcttgaacaagtgaaagtcgattgtacagtctgtgggcatatttgctatattttatatattttcagctaaaagcttcagaaagtggaatagatttcagttaattcatatgtctggaatatttctagagttctatgctatagagtgaaataacttagagatcaaagatgctattttttaattctaatctttccacttacggatttgggcaagttatttgattcctttaagactcaattttctcttctgtagggtaggattaataatacagcaatcctctgctactactgtgggtgtaaaatgagttaatgtgtatgattacagttccccaataatgatatgccacatatattttatgagccaggttatatgctgcattgcatgtgcagcttaatatgcttacattaatctttaatatgatgatgccaatggcaactaacatttgcatgttttcgctgccaggctgtcatccaagcacgtcacacatatctcatttactccacagtccttgcagaaaccctcggagataggcatcttctgaggaccccagctgattctgtcttaagtcatcccactcacaaatcatcctttgtaaagatcttcaaactcagagactgtttcctttcagaccatctgttactgtcttaaaattgaagaaaataatattttggaagagaagtaggggagaatcatagtaaagagaaaagacctctccaaagcttagatctctgagagtttggtgataattatgcagtagtacattctagtaaaggatttttttgtggtgatataatgtatttcaaaattccctccctcatacatactgagttcctgcctactgcatgtaaggcactatcttgagctgtgggaatgctgctgtcaacaaaagtcaatctgccctcatggaggtgacatacaaggtcaaatatctaatctcccatagtccctgtcacacttggagcaatgacactaaaactggtgatatgaataagaatgaaagggggaggagtaaagaatgtatttaactagctttgtagtatttctttgatcaaaattcctgttcatttgcatttatatacacatttatatatgctgatacacatcagtaggaagaaataaactgtagtaagcatgcatttttacattttctttcccaaattaaaaaaaataggaaagagaaaggcttaaaaggagatggtttttaatgtggctttgttttttaaatatctagtggaaaaatgcattcaactgtggaaagaattagtcattctagttgtttaaaagcagggaaaattatcaccatgttaatttctgctgacctcttttatgttaaaccatgtaaagtactttttcaattatggagctgatttgatttactaagagtttagatgagtaatttatgaactgaattgaaaaccagattataaatcacttcagcctgacatttggataaaatataatctgaggttgtttatggtgttctgtcagagaaattcatgagaattagctctcatggcagttctaataatcgtcatttttgaccaacttagaaatattgtatttctacccaaagacaatttgcttaacatttgatatttcaataggtaactaaacaaagggggaacaaaggatattacttttatttttaaaacagtaggtttttaaataatacaagaaaaggcataaccatctgttaatacatcaagcttgtccatgtggtccaggatggctttgaatgctgcccaacaccaatccgtaaacttagaatggcgatcattaaaaagtcaggaaacaacaggtgctggagagattgtggagaaataggaacacttttacactgttgatgggactgtaaactagttcaaccattgtggaagacagtgtggcgattcctcaaggatctagaactagaaaataccatttgacccagccatcccatgactgggtatatacccaaaggattataaatcatgctgctataaagacacattcacatgtatgtttattgcggcactattctcaatagcaaagacttggaaccaacccaaatgtccatcaatgtagactggattaagaaaatgtggcacatatacaccatgaaatactatgcagccataaaaaaggatgagttcatgtcctttgtagggacatggatgaaattggaaatcatcattctcagtaaactatcacaagaacaaaaaaccaaacaccgcatgttctcactcacaggtaggaattgaacaatgagaacacttggacacaggaaggggaacatcacacaccggggcctgtcgtggggtggggggatgggggagggatagcattaggagatatacctaatgtaaatgacgagttaatgggtacaggacaccaacatggcacatgtatacatatgtaacaaacctgcatgttgtgcacatgtaccctggaacttaaagtataataataaaaaaaaaagatataaatgttggcaagaatgtggaaaaatggggaacccttgcccactgttgatgggaaagtaagtataactataatggaaaatagtatggagattcctcaaaaatttaaaaatagaactattacaagactcagcaatctcactgaaggtatatatccaaagaaaataaaatcaatatgtcaaagaggaaaaaaaatatgagattttcttgcaattttttttttagctgatcagttatcattagtgtcagtgtactttacgtatggcccaaaacaattcttccagtatggcccagggaaaccaaatattggacacccctgagctacattgtagagctattgttcacaagcccaaccatatgctacaactacctggggggcttcaaaaaaattcttatgtctggttcttaacccagacatgtcaagtctgagcctctaagagtggggcccaagtggaggtactggtttcaaactcccttcagttgattctaacgtccagtcaaggctgagtactgagtggaaaaggagtggactcaggatcacacaggttaagggagaaaagctttggagaaggccatgatcacaagctgatcatgtagcagtcttacttcttctaccaagattccgcaggcacaacaaaagaaaagagaagctgggcatggtggtgggcacctatatccccagctacataggaggctgaagtgggaggattacaagagcccaggagtttgaggctgcagtgagctatgatcacgccaatgcactgcagcctagatgacagagtgagatcctatctccctaaaaaataaaaagagaaaaagtcccagaaattaagaaaaaacccagaacactaggggaaattacaggatgttctctgaacagattctaacctgtaaccagtacttgaaagttacctcaatattattgctgttgggggctgcctctatggtaaaaacagtgttaagaagtgaaaaggggaaacatatctaaatgtagtatatgtatttgctcacttattaagattggtttttcttctgtggaagaatgattgtttcatgactatttccatgaactttctttctggctatgcattcattctttttacacacattttgaattaagatatatgaaataagcagaagatgtttagtcaaaccataatagaagctttgaattgtttttcgtttactgacctttccatttcagcacccatttctgggctgtttgtcgggggtgggattatgacaaagatacagtcctgggcaagatgaatgaggtcactatttactaagccttggaaataggccagaaacattgtaaataaataaatgtagttaaccttaacaaaaatgaaaatacttattcctacaagatattaatcaatttcaccacaatttcctctgagtgatcgcatcctgtgtgtctaagaacccttgagtgctgatgttgagagtcatctttcagtatctaagagtggattaactaacaactgtataggagatatttgaaaattaatgaatcagaaattttatctatatattagaaggcaactattgtttggaaccacattgtaacagatatgagattacatctagtggcattttgacccccaccccaccaatttcccacttacacacctgccatatgtttttctatttggaatctcttctgctcacgggtgaatgaaccacatcactggcttcctgggaaagctcttcctacatttattcttaagtaaacatctctttcttgtggcttctggagggctaattgttctcctatttctaagaatcattatttttagcctagaacaagaagaagggaagggcatgagccacactggaaataaagtcccaggactttggtgagactacatgggacacatcttaaaatagcctaatgatttagtggcccttttcccagagagctgagaggcactcatgtggagagaaagaagtttcagggaagtgatgttagtaagtgagaaagtgagtagtttgtggtgtgtgtaaacctcagtgtgagcctgggcagtgatgacattgtgatgttacctgatggagctaaaactaaaacaagaaggaggcaatgcagaatattaaatagataagagttcataatgcaagagtttgtctagtcttcacttagaaatttacaaaacagttcagctaagaaaccgataacaatacactatttttgcacataattttttggccattttcattaagctatttacatggtacattgtggttctaaactattgtctttttaatcttctgggtggctctctctagaataatagatttgtttctaaatattggatgtaatcgtaatgaaagtgtctattatacacgccatattatttgtgacccccatcctctcctgtccttaattttcttcttgctcaattgtcttaactgagtgttgactataaattcataaaaattttagtattttcagagggaacttattaacatggctattgtagtaaataacaggaacttcatgtagactgaatctaccatttgttatctatttttgacagtaaacaattgattttagtgaaaactgaaaattgtattataatgaaaattaaaatgccttgtttgtcattctcttttaatttaaattttgttggtttggcattaggtagccacaataacaactccctattttagaccttacctatctcccacacacaattttttttctcctaccatcttccctctgttttccccttctcttttcgtgtcatttctctcttcatcccttcctttctcaagttaacacggagaccttatgtgtccacctggactgttctttaccaaggtttgggccacagcaagactcctttccaattctaatagcaaccattgccaatcaaccccagcattctttgtccagacctagtcttagtcctcctcccttcagtctagttctccaggaagccattaccagttagtgggggttgccatttattctatgtgtatgctgtcgagaaaaacattctctgcatttcacagtaacagtgttcctgaccatgagaaccacttagggcaggggtccccaatccctgggctgtggatgggtactggcccgtggcctggtaggaactgggctgcacagcaggaggtgagcagtggaccagtgagcattcccgcctgagctttgcctctgtcagatcagtggtggcattagattctcgtaggagtgcaaaccctattacgaactgcacagccgtgggatctaggttgtgctttccttagcagaatctaatgccagatgatctgaggtggaacagtttcattccaaaccttactactgcccatggaaaaaattgtcttcacgaaaccagtccttggtgccaaaaagattgggaaccactgacctagggtaatcagggcctcacctggatctgctggagcagaatctccagaggaggagctcaaacattttcttcacttcagttgtgattaaaggttttgtttttcctgaatgacattttagaaaacgaaagtataaacaaacatcttcccacactccttaaacaaaatctctcctacccaggagacttagtgcaaataatttcacttctcaaatattagccttaccaggcatagtggcttatgctggtaatcccagcactttaggaggtcaaagcaagaggatcacttgaggcaagagttcaagaccagtatgggtaacatagtgagacccccattggtaccaaaataaaaatattagtttgtatctctgtaagtgttctgagtttgcccaggaagctacatttaggggtcaacattataggaggagacaaagtgccaatgatatagagaatggtcaccataaattcatgaaaacttggtacctagtgactagtgttcaaaattaacaaaccgaagttccacatccttatccaatcaaattgatgctaatgtatttatctgccaggaattaagaacagatgcaatagaattgtcatatgccaactgaagagggtgaaaagaaagacagcaaaaagaatattaggatactgcatcttactcttccccaaagtaacttatttaaaattacttaacatgggattttaataggaacccagctataacacaaataattttttctaacaaaagaaaataatgatcactgtgaagaccacttcttatatagtatagaagtactatctagtacatgagcattttatttatgtttggctattcatgcatttgccaaagtatctattgaagttttttgtttactactgagataatctggtttccaaatcacttttatctctgttgaaaacatgagtcatattccaataaatgtaaacatagggcagtttcttataaacgcaaggcattattggtatgctaattgtatgttccactttctgcatgcttaatcatcaccttccagctccaataaattgtaccttaattgctgaggatgtattatagtctttctattcttaatatctcagtagaagaaacatttttaaaagtgctctgataatattgcttacgttgttagataaatggctaattcttttccaaacgttagacacagcagttatagttgcacaacctggtattagctttaagtggttttccccactcctagtcctgttagctatctcttatatgattgagtctatctttttatggtgctaccagtcagaggtcatttctacaaccaaagtcaccttgtattagagaataattagttggcacagagtaattcacatttatcctcacattgtgcactgaatataagatagagaagtagttaacagaaaaatactggggatgagtgcacagttttctcttcttttgtagaatgttttcaatacaactgataaaattattttcacatgctataggtagccctaatggagaaccttgtggaaagacttgtttggaagagagagacaatcagtggttgggggtcacactttccagacagccaggagaaaatggatccatcgtggtaggtattggaactggtccacagatccatcgtgaaatcagctatcctgggtgcagctttcacatcatttggtctacttttattttattcagacttgtgggcatagatggaaaaatatattttacataaagaatgaaaataagctccccactggtggttgctatggagtgccccctgatttacgaacagaactgagtaaaagaatagctccgtgttatcaaggtaaggcatgattttgatacgaattagataaagataagtaagtgaataccttttagtgttttaaatttatgttcaagtttagatgttcagaggagagggagatcttctaagtaattatgttctttttaactactcaatttctttctttacccaattgcaatagcattatttttcataaatgcactttgtgctataaaaattctacaatttgaataactctgaaatctagctctttaactacccacttttgcatcaaatttactttcaatttggtataggtgagactagtacccagcaaatataggacatttaaattgtgaaattatattggaagtctgattaaaaagaaagactttaggtttccttttttacctttagcttccaggagtaattgggaagaataatcagtgtaagcaaatctttcattcgcactcactatctctttttctaatttacatgttttccttcaagcagcaagagattcgtgtcttgagtttgaaacatttttctcatggtaactctatgctataggtagcatcagcaagtacagagctaggacataacagaagtgagcagaattggggtgaatgtcaacagagcatgtcagaggatatctgcagcaaaactaaaatccaacaatgcgtctttaggagctaagaaacatatgaatgcaaattcataattttctaaccaccctcactcaaaaaaaatccctcagcacgcaaagaaaaattttattggttggcaaaactttggccaagtatttgagttcaattatgggtgctaataagactttggtctttcttccttggaatgtgatgtcacagagcagcttatattacatatattcctattttgccttcggatacccaaaagataaaaaagtgaatattgattctcagttgcaataaaactcagtcttgatttctgtatgtttgctgtcttctttttcctaatagttttcggtttatctttaaaatattttcatagtagagtttttagtttttctcggatatacatagccacatactacaaaaatctcaagatgccataaacctaacccatctacaattgtaaaatacaggatcaggtaagatatatttttttaaagggatgaaaactcctgaccagaaatggtcattataaatgacttaccaatttattgaagttttctgcttagcaaagccaaaaggaagctgtggttccaattcttattttcatagaagtttacttatatcattttttggaagaagcaaagctttgcccccttagaaagttccaaaagcattcattcatgggactttgtaataatagacctttatgtccatgcagatcttgattcagtctatatttcagttgggcaaaatctaagaaaggacactctcttcaattaatggtgttagcaatagcaaagacatggaatcaacctaaatgcacatcaatgttggattggataaagaaactgtgatacatacacactgtagaatactacacaggcataaaaaataacgagattatgtcctttgcagcaacttatatggagctggaggccaataacctaagcgaactaacacaggaacagaaaaccaaataccacatgttctcacttataagtgggagctaaacattgagtacatatggacacaagggacacaaagtaggcacaaacactagggcctacctggtggtagacggtgggagcagagagaggattgaaaaactacctatcaggtactatgcctattacctgcatggggaaataatctgtacatcaaacccctacaacacgcaatttatctatgcaacaaacttgcacatgaaccctgaacctgaaagtttttttttaaatgcctttgggaaaattggctatctgcgtgcaaaagaatgaaattgaacgcttatcttagcaaatataccaaagtcaactaaaatggattaaagacttaaacacgatacctgaaaccataaaatttctagtggaaaacataagagaaaagctacttgacattagtctaggcaatgagtttttggaaattacaccaaaagctcaaacaacaaaagcaaaaataaacaaatgagactatattagaaagctcctgcatagcaagggagataatcaacagagtgaagagacagtctgcagaatgggaaataatattcgcataagtcctatatatttaaaatgtataaggatctcaccaactcgatagcaaaaaaccaaataactgattaaaaattagtcaagagaccaaatggctttctttccaaagaaggcatcaaaatggccaataagtagatgaaaaggtgcttaacatcaccaatcatcaaggaaatgcaaattacaaaccactatgaaatatcacttcacacctattagaattgtcattatcaaaaaggcaagagataacaagtgttggcgaaggtgtgaagaaaagggaacccttgcacactgttggctggaatgtaaattggtacagccattatagaaaacagtagagaagttactcaaattaaaaataaaactaccatatggtccagcaatccctcttctgggtatatatccaaaggaaatgaaatcagtaccacataaagagatctgcgtttttatgttcattgcagcagcattcacaatagccaagttacagaaacaagcttagtgtccattgacagatgaatgaatggataaggaattgtgtgaggtgtatatatacacacatatatacataaacatatacaatggagtattattcagcctttaaaaaaggaaattctgacttttgtgacaacatggatgaccccgaaggacattattttaagtgaaataagctaggcccagaaagacaaatactgtatgatctcacctatctgtggaatctaaaaaagtcaaatacatagagaagaaggtgagcagagagagggttaggaataggaagatgttggtgaaagatgttggcatttgtgtaggatgaataagtctagagatctaatgtacagcatgaggactggagttaataattgtgcactggaaatttgccaagagagtagatttcactctaaatgcacaaaaaagatgaccgtgaggaggtatgtaaagtgtagtaactgtttcactatgtatacgcatatcaaacctgatgttgtacaccttagatatacacagtaaaaagaaagcatgggctcaaaatcacaaatcctacctctgtcttactcatttgacaaaaattttttgagtatatgctgtgtgtgcttcctatgaagaagcagagggagatatttttattgccatttcatagggatattttgaatactaatatggaagggatttgttatatcaaggttactggtttttatttttaaaaaatacaaactatagaccttaaaggacatttttgtaaggatttaagaaacaaattatggagattttatctttaagataaaattctgagttgttttaatatttcattttagattatgtgaaaaaatttggagaaaattttgcatcatgtcaagctggaatatccagtttttacacaaaggtaattgttcaaaaaatagctgctataaatgtttacatatagaatcttaattcttctcatggtttggaagactgatatgttttaaagtaaaaattgtgtaacatcttcatcatgtctcttaaacttgagtattacaacttaatttttgccactcaaaattccacatatatttcaataaaatatcaatatttaggtggctatactgcataagatgaatgaaaatctatactaaagaacatttctttcatcaacaatttaatgaaaatcaaaagtagctatggttaattgtcttgttaacttaggtattgaaaatatcaacccaagtatgttattttaaatttctagttgaggggcaaaggaagaatatcagtctatatttttcattaaattatgataattgggaaatttaagaatttaatatccccttaaatcagatagacaatattcccaagatttcttactctctttctaacattctaggatatgtatgaaagggcacagttgtactcaaccccaaatctctcagttttcttaaaaacacactgtgaattcaggaatgttttttgactccatgaagatcaggcactatatcaagtttggggttgacagtgtctgcacatattaacagttatattaaaatgcttacaaagaaaatgctttcttcagtttaagttgactttttttaagtttaggattgtttaggagtatagaaatatgctaaagatatttaattgctgaaagtgttcatactataccaggcaagggcatgctcattccaatcttctcctaaattttcctctgtataacaaaatatgccccacattccattggacttttttccctaagctaacattattagaaatgttttccctaagctaacattattagtcaggggttctttgcaaatagaagtaaattaagtctactttttattctttggcaacacatgattatctccataattagcactaatgaattacccacatacgattttctttaataggaaccacattgcctttctcccaaaagcttactctagcgttcagtacttgtcccttcaacttttgaaatccactgataaatgcattgaatgagagtttcagagtttcttctctgagatttcgcttttagaaatccattagccaacttctctggctttttttttttcctagtatgttttaacttcacagaatattcctacttcaggaattgattattataaaaatatgttctcttcactatcgtgtatctggaggaggtttggggtggtgagattaaagtttaaataataatagttttttttttcttacaggatttaattgtgatgggggccccaggatcatcttactggactggctctctttttgtctacaatataactacaaataaatacaaggcttttttagacaaacaaaatcaagtaaaatttggaagttatttaggtactataaaaattgacaaacttaaatgatctgtgccttacaaatactagtactgtaattataaataaggaaaatgtattttccaaagatctaaatggccagtataattacagtaataattaggcagttcagaaactgtctcttaaggataggatttatgaaacttcagtgaactcagtattttacatttacacatgtgactaaaatcatcaatatataattcttaatagaactcctagtttagtttactctttgtagttcactttaggaaacactagtaagtttctatctctatgtagtcaactgattatacaggttgtttctgttgagtgcctcccatatctcaggaactttttgtgagaactttacatgaattaactcatttaaacatctgcataagtaagtatagtttccttaagcaccaactgaaagccagtggtactgtccaccacattctggatgaggggctccatgaagcacatgggtctaaaaacagctcattgaccttcacctcataagttcttagaatatttcccagagcttaactatttttatcatcttcctcctcctcactgtcatctcataagtcaatagtaggatactttatcatctgtatttcaacagaaatgcaaacttttctggcattaatgtccattacaagaaaataaatgcttttcctatagattttcagaaaatccagctttgtttaaactgtatgtgtgtcaaatgtgagcatcttacactcagaaataattataaaataagcactctttctttctattcaaacagaagaaatttcaagtagaagaatttgttacaattcaatgttttcttgtttatgatgaaaggatactttgaaatcgttcaagaaatataacttgttacgccttttatcacataaaatacgaacaattttttgtcatcgaaaagtcatcacaaagatttggtggcaaaaaaagttgaacttcagcaagatgtttatttaaagtttaaagttttcatttcccaattgagattttatatttaatatactctaaaatatgtctgttgtaatcctagaaactgattatactgcaccagatgtaaagatgctattttcaatttctaggactcggaaatacataccatatgactgcagttttgtaaaacatatcaaaattgcataaaacataatgaatgaccaattttgagtatctctatgctaaatattcttaactgcttaatgtagtgattttgaattcggtatcatttaattttatgatctattttacccatattaccatatgatgtactttacccaggactctcatactttctcccttttcttaaaggatattcagtcggagctggtcattttcggagccagcatactaccgaagtagtcggaggagctcctcaacatgagcagattggtaaggtaagaattacatttttatatttatttcttcacaaaggttcaaatatattgcatgaataagatattaaaggagaaactgtgaatgttgtaaggaaagaaagattagaaatgatgaacagattattacatttagtggaattggtgaaagatgttatggttttagaagaaatttagcaaaaaactttctgaaaaattacaaaagtcaaacgagacattgttttaagaaaattataagatagaactatctaaaaatgtccagggagtatatggtgaacagtttcacagctgaaaagaagttgaggtagctacatattttgtagtaagactagaaagaaggaaatattattcctggttttagtttttgctgtgtcgctatgtgaacattggtcacccagcttttctgagccttacttttgaaaactgaggcaaacaacacttccggtgccccctctataggatcaataagataattcctgagaaaatacttttgcaagtaaggcatattaatgtaacagtggatcccaaacccttttgtgtcactctcaacaggatttatttttatatttgagcaattaactgcaagttgtaaaaattcatgttttgatcaaacagaaaggagtggtgttttaaaaaatgttattcctaaaaacttttctaattctttccctaattacaggcatatatattcagcattgatgaaaaagaactaaatatcttacatgaaatgaaaggtaaaaaggtaatatgtctctacctttagtatctctgtgggcttttgcgagtaaccctgcttttttctcaatgagtggatctggtttgttttgggacagcttggatcgtactttggagcttctgtctgtgctgtggacctcaatgcagatggcttctcagatctgctcgtgggagcacccatgcagagcaccatcagagaggaaggaagagtgtttgtgtacatcaactctggctcggtatgtccaagtgccccaactggaagccatttatggaattatgatcaaaactcaaattggtcttattccagagatctgagattgttttcaggtttcttttattgacaaaagttaaaattctaatactgtactgatgctctaaaaattaaatggaatatgatgatgaatgggaaagtttcccattttgatattccagaacaatctatgaaatagattgttagggagtttctctgttcacagcttgtatgtgttcactctggtagctgaaatttctttcagttttatgttgatactaatctaatttgaaagaataattttcatacctccttcaaaatgtagatttcttaatagttctagttaaggtccttatataaattataaaatattactaggactagaagatgaagaattaagtattttcaatttcttaatttgaaaacaattagaaacaagatgtgttttgttaaaacattaattttcataattcatatatattatgctcttgataagaatataaaattggcaaggtttattccacagtggatatattagttgcataaataggtaattactgactgtgattcaattttaaattattagtgataatttgtggtagaaactgaccacttgataattcaaagacttctggccttatcttgccagcctagattcttggcgttaagtcaaaacaaaaaattggtggagtcttaatgaaatcttcttggcccgttctttgatttgaaaacaagagtgggcttgtgagaagaccagttcatttataatggcatagcatttttcagtcaggattcaacaaagtggactctgtttcaagaaagtatttgtaactatgttcagtcaatggtttcagagcatttagcaagttcttatattaagcatcagactaaactctacaatttaagaaagaaaacatctagtctcataaatggaagattctctaagtttgcaatatagagcagggaagttatttatgctttggtatttcctacactgtatttaacctacatttaatagtaaaagcaaattatctacacagtgatcattaaatctcatagtagtaatatcagataattttcttccatttctatctccaaaaatagtggtctttgtacttgctacatcctcgtgctgcaaatttctcttattttcctctttacgactaaacatccacatgtatacctaaagtaaagcaatatagaatcattttcccccattgaaatcttaatctcattaagaaaaaacagataaacccttctacccacttggctaccctccttttcttccctcatgcctaccctgaggcactactcttatgaaacacttggattaaattaataattgattccagcttttaaatcctctgatgtagattagtcttcctttgttccatctaacctctcatttctcaactctgaaatggcactaaccactaagtggcatttatttacattgatttgatttggtattgtgtgttcttctactgtagtatagatgccttgtggagagagattgtctgtcttgtttaccgtggtttcatcagggcttggaagagtcctagacaagtaggtgaaattgtttttgaatgaactcaagaaagaatgatacttgagtgactggcttctgcctacttgtactaaaatagctctcaggggttcctagcgaactctcagtcaccactctctgtgactagggaatacttgaagaagagtgatcacctcttcctattgaaactctccttccagaacttcagagccattgcattgtcttaagtctataccttgtctgttctccctggagccttttcacccttccactccttaatttggacatttgcccaggagccaagctgttttatccctgactcctttgaatcaatcattcactgcttcagtgtcagtgattatatttataaagatgattcccagtcatcttagttcatttaaaataaaataaatgacatttagtgagtatctgaaatgtaaccaggactataaaaagagctaataatcttagagctgaccccaggacttcaggatctttgtgaagacaccaatgggagtaaacaattgactacaacatggtacatggcacattataagtacatacaaagtggaagaagtgattccctttgggtcaagaagcttttacagaggaagtagtgtttgagaaagacaaaaatcagaatttttctattggaaaattcacaagtgaagacacttgacaaagagcatgtgtatgcttaagaggtgccaagtaaatttgagaagaataaaggacatggcctttttttctttttaatacaaaagactgacatgatcaaagtttcagaagagaactggtagctgttattgcaacagcccattattacattattgaatgtcttattgtagtaactcatcttcctccttcctagttatcagttgactaatctatgctccactgctgctggttccaaaggccagcttcaatcatgtcactcctcaactcagaaaccttcagtgtttagtattattccctaaattaagagtaaattttcctcgacaatcaagacgctacactataagactgcaatctgacatttttgtctcattcattatacataccattcattagagccaaattctttggaatttgttttgctgctagttttctctgtatatcaaaattatgcttatccttcaatagcctcctggcatgccatttcctttatgaaatgtcttctgttataattagattttttttttttgcgtctcgatattgtaaagcagtttctacttctcagtcatttatatgcttgtgctaagccttccctataactgtgggcttattgaagaaagggaatgtgttttgtgcacacactgccttgccccttttcaccttttcgctctttgcacagtgtgttgtctttagtagaggctcaataaatatttgctaaattgaattatcaaaatgatttattggattttcaaagctagagatcatgagtttgacaattttttatgtcctctgaggtctaatcatactattatgtgttgacagactcaataaatatttattgaattgaactgagatgtgtgtactaaagctcagtctgtagtttgtccaacttgtttgacacattagaaaaaatccatatccaattacaacagtaaatcgtgtaaagttgtcagggagtgttataatgacacgttttctctccctttctatctagggagcagtaatgaatgcaatggaaacaaacctcgttggaagtgacaaatatgctgcaagatttggggaatctatagttaatcttggcgacattgacaatgatggctttgaaggtaattaaaattatcaaattggtacttgatttctgcttttaaaatggtttatggaagaaaatatgattaaagttttgtattgttttccttcctatagaagatggagccagaatggcatgctaagttttttcttttctttagtgttatatatgacttctcctcaattgtcacccattgatctttaccactgttaataatggatgatattcaaaataccttatttcagtgattctaaggcaccattgattagaaactgcattattatttatgtgtccctaaaagctacctattaagctgttacacccaccatttttctgttaaggaagatcctgatttcagaaataataaaatatgggcaggaaatgtgttatcatagactcattggaccacggtatttaactatcagtacaataaagacactgaccaaacccaacagaggctggctgcagagctggagcagggttctggaagcccctgctctgccaggcattccctatagctatgttgtggaggatctggggaattcaagaagagattctgagcaggccactgggaggcctggggacagtggctgtttacccactgatattgacgttttttattaattgaatagatggtagtgtggtaactgtgcatattgccatggatgtcagtcctgttgttgaaatccctgcatctactagcatttactgttaaaaatttgcttttatcaatctagttctaagtggtaagtaactgagtctgttaaaactgtgcataaaatggtgaataggtttaagaggagagtgtgcagtttcatggagttcagcacataagtatttgatacttatttttagggttcataattgtcttcttgataaggccattggcaattagtatacggtagttttaggctaaagctttctcagagattaaagtgctggggtactataaattctcatctccttaatgtcttcttgtacctagataccacaatctactttaaatatataaaatgcattattctacataaaaagtcagttattgaatacatgcttccagtgaaccttcttaaacgtaaaatagtgtaacttgttatacaagtattactgttctggattttttgtttactattttaaaactgaaagaaaaaaataggtgtatatacttttggttattacgattacacataatttttttaaaaaacatgtatgaatgggagcctctctgtaccccacccatcactagcttccccctacttcccttaccctcccaggaccccaggttgggcattggctcattttcataaataacctcatcccagacaggggtgagggaaggtgttgtggctgttttgtttaaattggagctgtaagagggatcatgtcatattttatgcccttcctagaaaggggacgggacacctggtttgcattcctgtattgaccactgctgccgtcactcgtcacattgagttcacatctcctgagagtttgtataaattcaggtcagcgctgctcctatgcagccatccagtgtcatagaaaagcaattcactgataactgatctctccattcagaagtgtgcagttttaatgtatagcaataagaaattgttatttatctattacaagcctggtttgattaaaaacaaaaaataaaatgttattatgcttgatgttacatctcataagtaaccagcaattctgtgatatttattgaacatttattttgggtcagatgtaccataccaggtacagaatatgtgccataataaatgaaaatgaagaaaatagtggcacccttttttatagctctaccatcaagtagaaaataaaattaatacttgaaaacataagccttatttcgtggcaagtttaagggttctacctaataaagacctatggataaaaccatgtttatgcattttgatttgtcatgtgtgttgtatgagacaacccaattctttcttttaaaaacacaaaatcactgtttagtaaaacacttattttgtctatgatttctctgtcttgttttaattgacacatttaaagaagaccattcactatttttactcttttgaatgtgaaaagtatatgtatgtacacatgagaaattatttttgtggcatcaaaatgtcaatgacaaatttgaattattgttagagctgtaaaactgttgtgagcataggcaaattcccttatcaaaattactctatacctgggaaaagcccaagtaattttccagtggtgtgaaggacagagagtgttcggtcgatgagacttaggaagaggacttcggaggtgactttcaggggacagtgcagtctctcaatttgtatatgagaccctgggcttcacacagctcttgtttcactgaaatccctcagcactccactcctaaaggtaatacctttatgtctggaaggttattatgcaaatgattttttaaaatattcctgcatatttttgtgctatttataatgtcatttataattcaccgcatatttacatttagtggctacattaacacttcagtgagtgtttataatgccatatatctttttctacttggtccagttctttttttattttattttttttttgagatggagtctcgctgtgtcacccaggccagagtgcagtggcatgatctgggctcactgcaagctctgactcccgggttcatgccattctcctgcctcagcctcccgagtagctgggactacaggcacccgccaccaccccagctaatttttttgtgtttttagtagagacagggtttcactgtgttaaccaggatggtctctatctcctgaccttgtgatctgcccgccttggcctccaaaaatgctgggattacaggcatgagccactgcacccagccctccagttctaattttatcttctattttgcccatgagtaggcgttttctatattttagatattagcaagaccattgctgatgtggaaacagggccagtgtgtcctagttcttggctgaggtcttttattccattccaccatgtctgcctgcatgaggcagcaggaatttacaagttatttttctttatgtgtttctttattactttgccccatcttctcttattttatttttctggggtggatgggtaaagatactttgtgttcatggcaagaagtgtaggattatgaagaaagagactccaacattggatgcaaatcacacttaatgtctttttattatgcaaatttttgtggtactttgcatagcaaacctaagttatcttggcatttgtcatatcacttttcaattgttctcaaatggaaaaaaaatcagactctatttcctgtgtccttagaaaagcaacacaagccattttctaaaaagatgaccaattgatttggcaaaaatttagtgtaaaactcatcaaaagcatgaaaaaatcggtcagacagactaatgtacctgacatgaccaacagcagatcacattttttatttcatatgtaaaatagacttgaccactatttatcggtttagtttcttttttcaccttgagccttattatctgacttttagactatatgtctgaatatttttagagcagaaccataacaagttctacaattgtaaattacaagctgtactattattttgtgtgcacctgaaatattaatatatcgtcaaatcattaagtgagcacttctgttttatttgtttatagggtacaagtgaaattttgttacatgcatcgattacatagcgatcaagtcagagcttgtgggtatccatcatccaaataacatacatttttacccattaagtaatttctcatcatccaccccacacaacctctttcccttctgagtcttcattgtctatcaaaatgtagcaggacgagccacagacaaaactcttcggacgccgagttaaagaaggaaggggtttatttggtggggggcatcggcaagactcctgtctcaagagccgagctccccaagtgagcaattctgtcccttttaagggctcacaactctaagggggtgcacgtgagagggtcgtgattgattgagcaagcagggggtacgtgactgggggctgcatgcaccggtaattagatcggaacaaaacaggatagggattttcacagtgcttttctatacaatgtctgtaatctatagataacataaccaattaggtcggggtcgatctataactaccaggcccaggatgtggggccaggctgtctgcttgtggatttcatttctgccttttagtttttactttttctttctttggaggcagaaattgggcataagtcaatatgaggggtggtctcctcctttaattctactttatacatccatgtgaacacatttttaaagcactgatttatgagtaagagcatgtgttattttactttctgtgcctggcttgtttcatttaagataatgacatcccccaccagttccatccctgttgctgcagaatacatgatttcattttttttttttatggctgaatagtattcgtgtgtgtgtgtgtgtgtgtgtgtgtgtgtgtgtgtgtgtgtctgtgtgtgtgagagagaacctctttgacacagaacaggaattggtattaggaagggaaatttgggggtatgacctctgttgttaatgagtctatagagcatgggaatagcacaggatctggaccaggctgcagggtttaaatcccaggtccacaacatcctggctctgtcaccttgagcaggttataccttgtgcctcagtttcctcatctgtaaagttggagtcagagtatttatttaatatggtggttgtgagagttacttgggtaaatctgcacaaagtccatatcacagtgcctacattgtaaacatagtataagtgttggctgacatactaataattttgatttatactaaaagaatgaaataaaatgttcagataagaagtaaaagcaatcattaaatacctatgttctgtatattgtgtcccaaattaagttgcataggcttggaaaacatttattgtatatatttcaaaacatatctttctcatttgaataatgatagctagaactttattatataacagatccaagcgtaatccaggaagagtctgaatctatatatgtgatagccagagattgaatatacccaagtgtcctctgtatggaaaaaaatttatctgggcctttttaatattttggctgaaaaggctcatctgtatttttcctaaatatttgccttaatctagatcactcttgctaataacaggtactgtaagaattacatcgccgggcgcggtggctcacgcctgtaatcccagcactttgggaggccgagacgggcggatcacgaggtcaggagatcgagaccatcctggctaacacggtgaaaccccgtctctactaaaaatacaaaaattagccgggcatggtggcgcgcgcctgtagtcccagctacaagggaggctgaggcaggagaatggcgtgaacccgggaggcggagcttgcagtgagtcgagatcgcgccactgcactccagcctgggcgacagagctaaactccgtctcaaaaaaaaaaaaaaaaaaaaaaaaaagaattacatcaaccacttcactaccaaggcttgttatttttttcatgtgttatgaagaatcaatatataggaaattctagagatgtaaccacagtggtggaagtataaacccagccctgattaaaataaattgctgtcttcccttcaatggctataaaatacttttccccactccttcttctcacatccctcttctcctcctcctcctctttctcttccttaccattcctgctcctctgttcctgtatgtatatattctgcacaaatctgactccagttattccaaaccaattgccattcttcacatgtgccatgctgcctattgcttccctgcccttgcacaggcatttccctgcctctaaattgcatttccccttttcttcacctgtctatgacctatggatactttaatctcatcttgggcatcattttctatgagaagccttttctaatttccaccacttcctcctcatatgctgtgttattagtctattcttacttgccattcctccccactagacaatgagtttcctattgtgatactgccctgttttgccagctcctggcaattgcctggaatatagtaggtgctcactagctgtccgatgaatgaataaatgagtgggcatatttgtatatgaaagtttgaaaaactttgtacaagtcaaaagaggctagcctttgtatgtctaaacaaagtaaatataggtgtctaccatttctttttaactgaaaatagaaaagcttttgcatttttaaaattttacattgtttagcatggagttatatatcaaagatatttttatcctcattgaaatagtagcccaaaattaccactatagttgataaaatgattttcaatttgatggtaataagtaatatcatgaagacaaactactttaggtttctattaaataaaccattgcatataagtaaatatatgcataaatagacaatacttggtaaaataatgaaatgctcttgcaactgtagaatattatttttctcctttgtgctatatatttatagcatttaagcaaccatgtcatttactcaggttttcttatattagttgatcagatcttttttcccttggtatcatagtctgacataattatcaataatacagaaaggtgataaaatcattattttacagaacaaatcctttttctgaaatcctgtgtgtctgtgtgtgcagatatctctaacagataccttaatcattttcattggaataggaattaaaagtcattttgcaaataaggtaagtctagactcccaaaataaaaattcttatgatcaaatattcatagattatgaggttattacatgcgaggcactgctctaagcactttacataggtcatatccttttatgctgagagtggtttttattatgatcccattatataggtgagggaattgaaacacagattaagaaatgggcccaacctagtgtggcagtgcccagtggcagagctcggatcagaccccagtggtctggctgtagagcccgcgctctaatcattttgttacactgcctctcagatgcttccactctgctttcttccatgtgcaaactattgtgtgcaatcctgtatatgatgatgatagtattttatttttttctgtctgagaagactgttatttttcataaaagagagttttcttatgtgatatgaattaaggttcataaggttagttttcgaagttgcattctttgtatcaagaatttatttttccattgtttaaattattggatagatgttgctatcggagctccacaagaagatgacttgcaaggtgctatttatatttacaatggccgtgcagatgggatctcgtcaaccttctcacaggtaaggtactattctatttccaaaagaagcattggttataatgcatatccttaaaacttccagggtttatgtggacttatttttcttaattttctcattcaaatacttaacactttatttcaccgtttacttatagtggcaaatgatcttattttaagggattaataactcttcaaactccctttctccataaataagagttgtagttcatttccaccctagcttgtctatagcccattaaagatttctctttgtatttcattaaattgcattctgaggtaatatccatatgattctaaaatatgcccatttggatttgattaactgtgtcttggccttgtggctagagccccatattttgtgaagattgcacagggagatcaaacacacatatgattctctgggtttttttcactgttgagtagtaagatgatagcactttaataatgtctcaggatcttactctgacttcacttttgtatgttgaaaaatcatggcatttcagtgcctagaaaaaaaatgacattcatatgcagagaagaaaagtttttcccttgatatttgcatggaaatattagctggcacagttatttttgattagaaaaatgagcaaatggttctctgtaattgacataaaagaaatgtatttgtctagtaaaaaaactaattttcttagcacgaatatcagcttaatatttataaacctgtatgtgaacatgaaattagatatgtggaatagaaagtacatatctggctagggttgttcttgttaaaaagtcagcttttatcaaaagcctcagtcataggctccactaagtgattatagacatcttgttttacaaattcttatttagttattcatgttgggcaaggaagtaaatagagagcctgaagagacctaaggaggccagacatggtggtacacacctgtaatctcagctactcaggaggctgagctgggaagactgcttgaacccaggagttcaaggccagcccaggtgccatagtgagacccccacctctaaaagacttgagagggagtaaagactatttcagaaaatctgtacagcataattttccctttgctcgcaaagtaaatttttttagtcacaaatgtcacctgttcatttcaagctggaaaaattttgtcacccttagaagtatttgatttaactaaaatgcagctttgttagtagatgtgccaaggcatgcctgggaaagctcattatttagctaaatcattgcttctctggtatattagtattcaaaaactacttcccactcaactttcctatttttcagagaattgaaggacttcagatcagcaaatcgttaagtatgtttggacagtctatatcaggacaaattgatgcagataataatggctatgtaggtgagtaattagtttatcataatttataaattggaataagctctatcatagatactgctttatagtgaagtacgtaaaactggtatgaaagacttcatcttactgataattttttttcttcatttttaaagttctccttaattcattcctaaaatgatcaagtaattcctcagcttaacagtgctagttacacaatgttatagtctgtgtttttgaaaacatgaaagcactcatgaaaatcaaatatatgaggaaaagaaagaaaatttttatttagaaaaatttgagtgaatgtttctagtccaaaaattgaattttgttttagtaaacttgtttttgtcataaagtttatgatatatcataatgggatgaatgttgtacatgaatagattcagagaaaagtggaaagaatcgtaagatgttagcatatattctctaattttctataaatagtgttttaggtagtcaaaggtgatacgtagttaagtatttatggctgaaaaataattctctttgactaatgatgatcattaatctgtgttgttttttatcctccagatgtagcagttggtgcttttcggtctgattctgctgtcttgctaaggtaagactgatatatttcactgcttaattgcaatttggtttaattgtaaaatgatgggaggtggtgtttaaaatcagcagtggtagtgacctcatgatgctcttttggtattctgaagcttaattattgatttttagggtatttttttcaccttacagagatataattaaatcatcaaagtcaatatttttagacatttaaataaaaagttattttgccctgtgcacagaaatgtaattagtatgtacacacataataagactcatgaaattacttggtgaatgtaaactgaaaaaacaaacgcatttctctccttaaggaaaaataattctgcaattaacattgctacttttatttccttctcaggacaagacctgtagtaattgttgacgcttctttaagccaccctgagtcagtaaatagaacgaaatttgactgtgttgaaaatggatggccttctgtgtgcatagatctaacactttgtttctcatataagggcaaggaagttccaggttacattggtgggtatgccctacaatattaatgcttgatggggtgcggttcattcattaatcccacaatcctgcttggagccctcaccggttttcaccacggagatcttctttagagcgggggagagaagctacctgatgcatgcttttcctctccatcttccagattcttgcgttgttctaaccaatgagttgggcacattagaaggctgtagttgtttagagattatgagaagcaaaggacatagtatcacttgctatattagtttaaggtaaaccaactgagcttaacctgtgaaatctctttcttcttgacattggataaaattgacattttatcaagtgtcaataattgaggaaagccaggcatggtagctcatgtctataatcccagcacttgaggaggctgaggcttcagcccaggaggtccaggctacagcaagctgtcatcacaccactgcattccagcccgggcaatggaatgagaccctgtctcaaaaaaataataaccataaaaataaatattaaaaaaattgaagaagctagacttgattctgatttctataaataatatgcttgttaataatttactgcgactacaagctcctaagaaccgtcacctatgtccctctgtataggcaactctcaattatctgctctggagaaagtatcattgatatagctcatccaaaatattgtggtggggaatcccaaatcatgtatatatgactttataagtatttttgctagcagattaatgttcctaattatgttttatttaggctaatataagaataactactagtgaaatgagcctgtggtaggagaagagcatatctgggcatatcatttagagattaataattcacaacgtttatgatcccctattaggacctgtcaagagtttattgtattcatgaccctgcaggctgctgttatctaaacatcgtgaagggcccacatacttattaaataatgccatggatatgtaatagaggtcttagtatgcattaggtacacaatgagcctgtacctgaaaggtacacaatgagcctggcatctctactttagatcagactcatttttaatagtgtcctggaaaagtcatggccagagctacagtaataagagggtggacaagccttcatctagttattgattggaaaatggcaatttgagagcctgaccacagagtaaattacacagtaacacagacaagctgaaggataatctgaaagacacacattgagtagatgacgctctttccttttacataaaactagtgtttcctctactaacaattccattgtgaccagatatttttaaaaatagttgaagacaaacatacgaaacacataaataatcatcacattattggagaagcataccttataattatcataaaatgactcccaggagaaataattcacatggcaagcatgtttaataaaaccaggacattttaactcttactaatagtggattttttttcacctttttcatttactttttttctgaactcagggcaatgaacttgtagacagctatatcaattgcagtgctatttctctgaggtattgaatctcagttattataattttgaaatccaattggcttggacttcattattttccaactaaaaagatgattgaaggatttatttgaaatgtgtaaagagtaatatagattttatgcttatgtttccttgaaaaaagtaggtaaaattcttctggaagtgttactcctaaaatacaaatgaacatgtcaagaattacataaattctttaaactatcacttatgaattattgcctctatgtagtgagtgacacctcagcagactattagatttagcttgcatggcaaagaactcatttagattcatgaaatggttctcactttcttggtaagatctggcttggacgtttttgttaattttttcttttttccttttttttttctttcaaatttggagatcttcatgagcagatgaatatttactatttcagatttgaaataaaccctgccaaactgctagaatatttattgagagaattttttaaaaattgcacaaattaacactggaaggtcaaactagaaaccaataacacacagaggaaggacagataatcagggcataagactggaaagatgacatttttaagaaaaccgtatatatagatttgacttaatcatgtgttcacttcatgtataaaaaaaagccttcaaatcagaaacaaatctaaaatataaaaaagtcatatataaaattagtcatataaccacataagatagaattattccaagtgacatttgagcaaagtgctgtgtctatacttccttagtcaatgttctgagaaaaaaaggaatatgaaacatgcaagacttttattagcaacaatttttatatttttgaaatttttatataaagattaagcaaataactaaagattttaatgttgttaatagaaacctagaggaaagttcataaatctttataaaagcaatttttaaaatttgtatttttaattgttccctctttcatatttcaggttagtctttaaaaagctgtttaataaagagaattccagatattatttccagtagtccatataactttaactattatcacttcaaaaataacaatagatgtatttcagtaattagattaattgcaattctctatatttttgcagttttgttttataacatgagtttggatgtgaacagaaaggcagagtctccaccaagattctatttctcttctaatggaacttctgacgtgattacaggaagcatacaggtgtccagcagagaagctaactgtagaacacatcaagcatttatgcgggtaatgtaagctattttttattaatgaatatgtgaacttcaacgttgttgatagagagcaacttattgtattggtatctttttataaaatgtagataaaagcaactgttacccctcctgaactatgacctgttgctccagttaaggtatgagacaatctcaacccaagtaattcagagtcctcttattgtatcatcctttttcacatttatcacatttgacctcatcatttgaaaacacttgccttttcctttctaaaatttcatttctcctatccctctttatctacttgcctagaaatatacatcttcagtagctcaactgagcctcaaatctattccgtggtacgttttttggggtgggtcaggggaggcagggaagttagtttgtttttcatacgactccagcgaagcagaatccaacatgactgcttttgggttatgtctttgtttccgtgccagctttgccagtgatgtcagtgggaactcacacagttgtagcatggtggggatcatctgtgggccaggacgatagctctcatgatggtttggggtatgtcctgccaaagcacagccgatttcatgtttcttttattaaaacactcattcccaaactgatcatcacattcctcacattggtcaaattttatcatatgaagctgtgccaggtctttttcattagggaacggtgtacttcatcagaaaatctattgtcacaaaaaaccaaactattcccaggagccctttctgggatttcaaatagtagcttcagcttagggcttaattttcccttagatacttattccaagcaaatgcaagcaagcatcaagactccaatacgctattaaatgctaagagcaataatccccatgctatttcctcatttcccttaacagtttttattgttgtactagaataaacctattagatggttcagagccaaaagtatagaatattaatgtaaccatcatttatatggtaggaattaaagaggttctttttttcatgcttcatagatgtcgttttacttaccttagtcaattgtagagacaaatattgaaatcattttaaaggcaataaaagggccaacattagatgttcacaaagaaatacattgtgttaaatttgtaaaagtgatctggtttatttagtcctgtgtttcttggcatcgttcctgtaaataagggatcatcaaaattgtacagctttttcggagtaaatttgtagcagaaatgattagcagaggtaagtgttgtgttgcatgtatatttgtagtgttaccatggctttgatggtagcaggattcagccattgcctttgtaccatattgcaaatattaaatgatagcacttactgctgggattgtacatggcagggactttttaagaaatgctcgtttccttcagtatctttttctcttcctaagttaccttgcttgtgtttggaacacttttaaaactcgtatatagaaaggcaaaaagttactccaaccctctcctttgtaacaaacccacacagaagataagaaccacagttgcagctaccctgaacttgagttctgtcaaggagctgtagctgttacttaagaaggtataggaatgtaatgattgtactttcccacctccaccagggtaatagcccaaggcattaggaaacattaacactcttaagtttctacagtctgaaagcataagacagcaacctgaattcttccatcttcctagaaaagaagacgcatagcggttgggatgcctgggttgctcctgtgttccataaaacgcatctggtaccatggtaccaggagtgggaatgttaacatatgtatctattttatctctgcattccttacaatgaaatgaagtggcacttgttaattatgtactggggcccacaacccccacttgtcagaggactccctgcctgtctgttggttggacatggtttacttgtgtagatgtccctactggccattcactccattaatttgataggtatttattgagtacccacattgtgtcaaattctgtatataccagtgaataagacataaaaacatcactaccctcatggagcttatagtctactggggtgagaaaaaaataatatgataaaaatatacattttatagtattttggaagatacaggtgataaaggaaaaaggagggcagagtacagaaatgtgcagtgctgcagaaggagtgaagcggagaattttaaataggatactcagaataggcttcattcagaaagtgacatctgagcaaagacgtgaagaaagtgaggaagttacccatgtagatatctagggcagttgttcttagttttagggtgtaatagcaacaacacctgtagggcttctgaaaacacaaattgctggcccccatctagaatccctgatttagtaggtctgcagtaagggctgagaatgtgcatttctgcaaagttcccagaggacccatactttgagaacagctggttcaggagaagagtattccagcgagaaaagctgagtcaaaaggcctcaagaatgtacctggttattttaaagaacaatggggaggcaaggatggctagaaatgtaagcaaagggaagaatggtggaagaagagattatatagaacctgtggctttttctctgagagaaagggggatctataacagcattttggcagagaagtcacatgatctaacatacgtatacaaaggaacactctagctgctgtgttgtgaatagagtaggagatcaagattcgacacatggagaagaggctactgtggcaacacaggtgagaggatggttccaacaaaagtggtggcagtggatatggtaagaagtagttgaagtcaatttgctgacatccaatttacaatttgctgagagactggatgtctggcatctgagaaagaggctctgtgatgactccagggtctttagcctgagccacttggaaatgtagttttcatcaattgagacaatattgcaggagaacaccttttgagtggaaaattctagagttcagtcgtgggcctgcttagctagagagacctattttaaatgtaaatatcaactaaggctttgtacatactcatcttgagttgaggacaggcagagaacaggaaaggtaacttaatatatctttggcatatggatggtatttaaagccgtattaagatggctgagatcagaagagggccaccgtctgtactctgggccgctacaacatgaagaggttggcaaaaagaggcccacagaggagataagaaggtccaatcagtaagaaaggaagaaaatcaacagtgtggcatcctggaagtgaagtgaaaaaaggggaaagcatgatgatgttttctatactgcagcttgatcaaataagatgagggctgaaaactcaacattggatttataatgcagaggctgttggtggtggtgacaacagcatttcagacattagtgggggaacggggggaaggaaaggaattggaagcgtcataggttattctttcaaaaagttttgccacaaaggtgaccaaagaaatggagctgggggtcagtagctgaactggagtgaagagttttttggggttttgtcttttaagacaggagaagtattagcatgtttttatgctgataggcatgctgcaatagagtgaaaaacttgggatatatgtgacaggggagaagagctggaactaaattcttgaaggcaaaaagggaaggattaaatgtacaagtgaaagggttggttctagataggcatgtgcatgattcatctgagtatgtgcttgcagatgctgggtagatgtggtgatggggactgtagaagttcttgtctgattgctttaataatctcagtgaactaagaagcaaactcatcaactggagtagggatggaggaagtggcatttggagtttgggaagatgtgaaatagtcttctaggagaatgggagagtaacaaaatacaggatggttgtcagatggtgtttgggaccacttgcacttattgtcataaactgagtgtagcctgtgtgcttgtgttttttttcccagtcacattcagtcttgcaggagtagatgaagagttacaattaaccagggttgtagtttggtcaagagagtgaagcaagcaaggagcatgcagcgggagggaatgtacaagggaatggttatatttttagttgtgaagttgaagcaggctaaggaggggagggggcacaccaagacggtgagggaccaggaaagaaatttgaattggagatcccaggacaatcagcaaattgttggaatcgactattaaacggatcgagctgcaaagatggcatagatattataaaatacaaaagcccttggagacctaaaagtgaggaaaagattgaattttgcttttatttttgctgacaatactttgattaccttatgcaaacaaaagcctttaaatttacttacaaaatccattgtgttctttgatggcggggaattcggctgtcaaaaagactccagatcttaagtttaaaaaattattctcttttaatcacaattctttagttttatgctagatcttcttggactagaggtgcatttttaatagtctaataaggatctatatcactggcatgtagatttttgttctggcatgttatttttctgaggctatgttttcatttatccggttagtaggggaatcagttttcttaagtctaatcataatcaaaagagtatcacacaggattactttgcttaactggtcaaaatttgttcctcataaaataagaaagaaggaagaaattgtctttttttttttttttttttttttgctttaaaaaatcctttgtattttagttgattataattatgccaagctttaattttggccaccagagccatacaattattagattttgctaatgagttagaatgatatttctgtaatataaaggaaatggttaatttcatttatatcttttagtgttttatctattgaaatcgtcttctattagacattgctttttcctctatgaaaagatgtttccccatttatgtaagtatatgaaaatctttgtttttgctttatttaaatatacaacttcatcaaattgtggagatttcttaggacaagggataattttgaagcagttttgatttagggaaacccaaactgtaacttgaagcagtttttagacatgttagagcagccatggtagtgaaacttcccttgaaattttgacagatgatatctcttggttgaacttgatggatccctgcatcaaaatatccactgatatttgagaggagaagaagggtgctacattgggataacaaaagaagcaatgagatttcctgtttgtctgcatttccaacaaagctagaaatactggcttagttgctgaacaaagaatgcctgtccccagagatattctgagagccagtgaattcagtggccttcgcatgttttattaaaatcatgacatcaatctacctgggtagattagttaattcttttctttgatttctcaaatttctgaattttagatttatgaaatgtgggtttattttgttatgtaaatctttaggtgacttctaaaactcatcttttttccatagtagtttcaggaaaacgtgtatttgattagtaaatacatttttttgtaattttttatttcatttgcttatattgttgagcaatacatgcacatagtttaatgaaatgtcatttactccaaagaagaaattttttaacaatagcacactatggactgattcatatatgcagacatttctgtggaaaatctaagtgtgagcaaactatatcactgtactaatattatggtattctaaaagtgaattgattattataacatgtgaattcttcattagattgcaagatctttgaggcaggatattatcttttgcatatttatattcttagagctagcacaatccattacataaggcagaaacaataaatatttaacaaatttatggatgctatgttcttggtgctatttaaaaaattctataagaaaaatctgagaatgttctattggtataatggttagggcatttgtcttaggggtgctgtcttttctcaggaaattgtaatgctagatgtctgactgttctgtaccacttgagccaagcttactagataaagggactgcaattatataagatggtgatggttcaggtaccaacctgtgtcttggtctcagcttttccttcccgagccctgcattagcaccagagaggtgtttccaaaatctagtcatattccttgcttaaaatcttcctatgtaagagcctccccagccccttttatgtgtagattaggtggccctacttcttctgtatttagacatgcctctgtcagaatattcatgccccacactgtctatgtggatttgtggaacatagattgtgacaggtactgactttcagttttgtaaccctagagctgccttggacacagtaggcccatgaatagatatcttcaaatatttattcctgacattattttttatttagtgatatcttataaatttttttgccccaccaagttaacaggaggacatgggcctgttgctcagctctcaagttggccagaaatacagatttccatgaaagtcaagcaagaagacagacattatgtaatttcaggcatgtgctaatttgcacgcttgtgggcaccctattttatgtaattgtccataaaaatgtggcatggaatcttcattatttttaatatagatagcacatgcccatccaaattttaaaatgtaaacaaatctacttttttactcccaaatatttaattaatcacttcaagacatttttgatattacagcttttgtccttaggtggagctgttaaagttaaataagtgtgaatatctgtcaaatacagtttttgcaagagtgcatgtacattttatatattgtaagaaaagcgtaattaatagctaattaggataatgaaagtaatatacaacagatgtagagaagaccttgtggaaaattagtatgaattagatagcatgtgatttggtcaaagtaagcttgttgagaagaattaaaacagtggacatgtggagggacaatcagtggctgtctagctcctcctacacctagggaatgatttaatcaagtttgctattacttgaatactcagggcttcaagctgttccgttttcacaagtcgataacttgggatttggccttgatttgcagcattcctatacggtcaaagtttcatgttgagatgatcacttaccaagtaatttaatataagaatctctgtataagaatggaaaagtaatcagggatcttgagtactctcaggctccaaatcttctaaataccgtttaataaatagagctctattccttgttctataactaattttctatttaatgttgatggttggcagtagtagttcagttttcttattccttccaaatgttcaccagaatctcctattctaggaaactgaaatttagtaatttcttagctggcttatatacctgaaatttgaagcaacatacaaatcttgtcaggtctgctttatggacattatgtcatttaatcatcacaacagtaaggtataagtataaccaccataattgttattattcctattttcagataacataactaagccatagacaaattaagaaacttgtccaatgttatgtagataataagtggtggaccccagatttgaacaccagttcttcaccttcagaccactattgcttttaaccactatatacataaattgataatgttgtaaatgaaaagagaaaaaagattacatcctttctgtttataattacataaagacatagaatagatatagtcttttatgtggtgtgtgtcatctttattaaattacttcgttgatttttatcaaaagttactatataaataatatagcaacacagcaataatatgtgtgatagggatttattccctatttcttaaggattattaattgatgagctttgaaaataatctattccttatctgctttggggcagtaatgtttaagccatattgcaatcctgaaatgtctatagataaatagaaacctggtccactgacattacttagtaggaggtctgtcaattgcagtgtcatgggtctaccttgaggaactcatctagcataatataaaccttaattatggttgaagctaatatgtctagcctgggtgaaaatactagactctttaatggtcaagagggaatttgttgaatctattttttaagatgagaagaacttatagattgaaacagccatatgaaaagtagagtcaaaaactgagccttaaattattagtatgaaagacatcacagtctgtgaccaattcatcaaattatctcctgcgtatagcaacaattctaataccaagaaaaacaaaaactgcatagattttctccacttgtttccgtgtaggtgggctatatgtggtgatgtgaactgctctctcatatcctgagatcatttctacttttaatttttgcagtgtctaaatcttattttatagatttctcatcgacatgtcttactttaggtttctcaattgaattctgttataaatcctcttaggttactttagtagtaaaatcttattagcttacccttttagataaggagaagtctgttttgttgagtaccctttgaaaatcacatttctgtctgcgtagtgcttgaacaggtgctttctaagagacactgtgttttatatgctacctgattttcatatacatttgccctgcagtaaccctgggggattgattccaggaccccacttggatacaaaaatccaaggatcctcaagtcccttatataaaattgtgccatatttgcacttaacctttgtaaatcctctcatatactttaaatcacctctaaattacttataacatgtaatacaatgtaaatgctatgtaaatacttgttatactgtattagttagggaataatgacaagaaaaaaaatctgtacatgttcagcactgatgcaaccatccattatttgccaactatttttgatccaaggtggctgaacccacagatgtggaaccgatgggtacagagggctgactctctttgttttcatagacttgagagtctaggacacttttactatctagtgaagtgcttacttaatcgaatgacaaatgctttcaaagatttttttttgtttatttcactgtgtgtaagcaaataattttgaaaataatgtggaatttttttaatgaggatagcaagtaatcaaatgaaaagaaaatcatttgtaagttgatagaaaatatttttaaaagaaaataatgtctgcatatagaaataaaggttaaaatgtaagaattgtcaatcagttgtaataaactcgagctgtttctttggagacagaagacaatgaattttaaaaatctgattattgaaaaaaaaaacttgtgaccacatatcaacaagaataggagtaagaaatgctgtgtagacataagatattaagtttaaatgaatgttatacagagcagaatggattgtgaatgggttacaatttctgtgtaactggtaaataaattcaagagttctttgtgaagtataaaagcacaataaacttagaaaaaacaaaaacggctgggcgcggtggttcaagcctgtaatcccagcactttgggaggccgagtggggtggatcacttgaggtcaggaatttgagaccagccctaccaacatggtgaaacctggtctttactaaaaatacaaaaattagctggatgtggttgtgcatgcctgtaattccagctactcgggagactgaagtgggaggatcacttgaacccaggagagagagattgtagtgagctgaaatcacgccactgccctcaagcctgggtgacagagcaagactgactcaaaaacgaaaaataaataaataaataaataaaaactttaacaactaataagaaaatcagtgaagcgaccagtgtatacaattagatgtacaaaacaaatacttttcctatataccattcagtatctgttagaaaagataatagaaaagttccataaagaaagaaaagggctgggtatggtggctcacacctgtaatcccagctctttgggaggccaaaactggaggagcccttgagcccaggagttcaagactagtctgggaaacattgaaagaccctgtctctataaatatgaaaaaatgggctgggcatggtggtacacatctgtagtcctagctactctgaaggctgaagcagaaggatcgcttgagcccaggagttcagaactgtggtgagctacacttcactccagtctgctgacagagggacacatcccatctcttaaaaaaaaaaaaaaaaaaaaaaaaaaaaaaaaaaaaaaaaaaaaaaactaaaaaggatgttttataataaatctggagtcaaatgaatcaaattcaatcaaaatgttgttgagagatataaagagaaaatgtatagggtaaagttaaatgggataaaaagcaccttgaaatgatttacaaaaagtttatcatgaaaaatgcttatgttataatatcaagttatcttttaaatgcgtagaaaatagcatggaagaaaatactcccaagtacagaactttataactattattggatagtattatttttcatttttattttttttgtgtttttcataagaaacgtaaatgattttgtgtgatatgaaaaaatatacatcttcatttttttaacggtttagataaaagataagtatttgctttgtcttccatgtatagtgtttggcccttttcaggaaaggagttttatttttttttaatctacgtgcttgtttttgttaattcatatggtggttattttccttagaaagatgtgcgggacatcctcaccccaattcagattgaagctgcttaccaccttggtcctcatgtcatcagtaaacgaagtacagaggaattcccaccacttcagccaattcttcagcagaagaaagaaaaagacataatgaaaaaaacagtaggaatattttcctttattcaaattattgtatggcatttaactaaatttttaaaatatggcataattctgaagaagtgaactatatgtcggaatttttaaaaatacgaatttttaaaaacaaaaatagatttattcatttctttaaattgtttatattccctttaggatattgaactgaatattttaaaatatgcatttaatcacaacagtagattctcatataaaatgctgatgttctatttttaatgccttgccagtgaagaaagatatattactagagagaaatcataatgggagaagattgtatttacaagttagttattcagtgtcatcatgtgtcctcagtttatcttcctcttctcattttctcccttgctttcatcctactcacagattcactcatgtcttcataatcaaattttcttgcttagttttacccatttacagacacatgtatttatgttatacaataatttctttttaaaaatttcattatatgcttttcagccacatcccaggatcaattgcatttgagatggatcctacattctaaccagtgaaccgttttctaaattatctcaaaatatttaagtttcactgacagtgtatttattctcaggagtcctgttgttcagacctttagtgtctatcaacacaaagacatagggtttgtccaaaaacaggatgtgtctgggcatagtaaaaagccttcattaaaatgttcactaatgacacacagaatgtaaaagatgaaagggacatttaaaggtctagttcacatcctgtccagacaaaattgccccatagtcactttaagataattgagcttacaatcaccactagtctagtctagaatacaggatcaaatgaagataactgaagagcagatttttctctacaccctcatatgaaaatatttacggaagtcaggggttgtttttactcttcttttgaacttcagttgtcaacatcaactatttgtaaatgtctttaatagtgaaaatctcaatattgcaagtacacaagccaaaaccttagcaattggtagttatattaatttatattttgattcttagaacaacctgctttaccaatagaaatggcagaaaaaaaaatcatatttatttagagagatatttacacctctcccccagctgtaggcacgctatttgacagtactctagtcacttcacacttaatgagcctggctccttctgactttctagatctctctttgttttctgcatctgtctctctctacctgttcccgttaccttcccttttatctctccccattttttccttttgcccagcttatgccttgggtcttcctaggtcctttgtagtatttattgatcttattaaaaagcttcgagttaattaaattctgaaacccttacttatttaattttgttcaatatttcctctaagtaaaatttctaagtatctccatgtagctaatttcaatgaatataaaatcactgtcccaacatctgtcacaattaagtgccatacttacacgtaataaatgggatcaaactgcagcaacagaaaattgagaggaacccaatgaaaaacatcttggcagctaataaactcctttaatgcctttcatttaactttttttccaaatcttatttcacttagaaaatttgggctttaaattttacctatttagaacttagctcttttagccctgcaagtaattgtcatttgaaccctactaattctcaaattgaactttttaaaagagataaaataaagagttgtcaatttgatgtatcaattttatttttctcatgcatcacaggtgtcgtcatctttaaaatatatataaatatacttgctgattaaatcaaaataaaaaacgttgtctttttatttccagataaactttgcaaggttttgtgcccatgaaaattgttctgctgatttacaggtttctgcaaagattgggtttttgaagtaagtatatgtggtatatagtctctgttattcatcgagagggtgtaatgagtgtgtgcatttgcattcccaaaagaaaaggaacaagagctaacccttgaaaattaacagcgtttaaagaattagcaacacaatgcttagttttttatcggccagaaaactggttatatcactcagactgatatataatccaagtatgacaaatttaaaaaggaataaactatcttgctcttctaaattcatagaaggggaaacagagtaaaaaggaaatagatatgtgttttagaatagcatctaacacatagcaaagactggataaatgttggttgctgtcgttattttataatggcaaataaaccactgcaattttgtatcatatctggatcccctatattcaaatcattttgcatatcaaaaagatgatgtgaaaacaaggaccagagagagagaatgaacacttcaggttgaggattgatcatagaaggcaagtgaaagaagggaagaagatgcatcagtgacagggcagggaaacggggaactatttttgggagattgggatataaatggagcagctttaatctggggcatgttgaatttggagggacttttctatgtggcattccacttgaaaatctagttcaggattatgtttggaagttcctccatatattagtgacttgtgagatggcccaagggatagaaatgtgaatttcacagaggaaaaaaattacagatcaaatcttggaggacagttttattcaaggagattaaaaagaatggggagtccctgtaggagactgagaaggcatcttcaaggaattaaagagaaccaagtccctggtgaaatagccaatggagaatataaaaagggagacttaatattgtaaaatttataaaaagatcagataacgtaatgtctaaaggtcatggaagttggcatttattaataaaatgtgacgggtggtgaaaaaatgggtatcactggcaaatgttaagatagaactctcagtgcagaagtagccaaatgacaggattagtgattaaagaaaggagagtatactgggaacaagtaggttcaagtgaggtatttttatgtatttatcaaatgttgttatttgttcaattattagaagatgtaaatgtgagtgccagaggcagggaaaagaataaattggagggagacatcttcaacttaacttccagcacatgcttttcagtccatacttgaattccactctgaagcatttcactgttcacttcctcttttgaatgtcttatcctttaattttcatgatactatcctactcccattgtcttagtagttatttagccctttcttttcagctgtttttgatggatctttgggtttggcaccctaaatggtcctccctcagccctttctctcactaccacattcaaccttggtagtcttgctcataactgcaatttcaactggcatgcctacactgctgatgcctaaaccagtgtctcttgagtttcacacccacctacatatcaaattccctattagacatgtccttttggttgccctatagtttcaatctgtccaggcactatccaggaatgacatggacattagaaagttaccaaagccagaaacctagggctcaatctgcattcttttctctttcttatttctgatatccagaattattaagtactacaatactaccacctagatgtctttcttatccatcatgctttgctatctctaccactattactccaaactaggcactcactatcctacctaggtcactaagttctcctgctttctaggatactggcctttgattttgcattattaacatacacatgtgataacagtgcttcagtggctcattttagacttaaaatctaaactcctgggtggtatttttcaccaattccccaggaagtttttcatcaatggctgaatacttatggtggtttggctgtgccatgctctcctgaacctctgtatcttctcacttcttctgcccatctacctgattaacttttatttatcttttaaatctcacctgtttcctaggggaagccccctggtcttcagctacttaaacttaagttctgttgtgcccttggtcctatggccctgtgctcacgattattgaaagtctgtctccacactgtcctggaagctgctgcaaagcagggtcctgtcatttttgtgttcccaatgcctaacagtgcctggagtgctgcaggtgactggagaggtttgctgagaatggaacaagatcccaaaagggatcagattcataggtagaggaattagccttagttaagaatctccttatcttgagctaacaagctatgaaaatatgtttgacattaagaaatttcagtgtggaaggaagggaaatacagagaactcatggatggctaggataaaaagcaagtttatatgtggtaattgaaggcattgaggatatgtttgggaactgaaaggaatggaaaaaattcaaaatagattaaggacagggagtcaactaggaataagtaaaaaggttgacaaatagggttgagtaccctactgtggtaggatcacatatggctgagaatcaattattttcacttaggcaatgtcagtttagccttgagagtccatagttcagggccaaaaagccttgacctatttgattgatgattggattttatacttaaattacccagattaactgtaatccagaaacagagactacggactactttgtatcccagcatgtagggcagtgcctttattgatttcttagttgaataacttataatcttcccatttctgtatttattttcttcctaaaccgcttaattatcttggtgtttttaccctcatgggcctttgataagaagacgagctgtgtgggggaaatcttttctaagctgcaagtaaaggagtgttttcattttcttaaatcagacacttgtgctatcacctttcattgcagtctctctggcctatgagaaaatgagacattgacatttataagaaaatattactaactatgcttctttcctgaataatgaaaatgcatcttaatgaattatttttctttgttacatgttttctcacaacaaaatatctgctttgcatttttaatttagagtgataatatttcttgcagcctatcaaacccattatgatttttaaatggcataatgattttaaatgaagtataaggctgtgtttcttaaggtgttgtctctgagccacctttatgagaatcacctggatgcttgaaagaaatgcagattcctaggccccagaccatccacgtcagaactaaaggggaccaggccacagatcttcacaattaatagagctccaagttcttatcacactgaaacctaagaaccaatgttatggtggtgaagagcttccagatttgaagtcaatctgacctggttcaaatcccatatctactgtattactagtgaccttttcagagaagacttttaacttctctagacctctttcctcattgctaagtgggtaaaaatagtaccgactcattaaggttgtcttaaagggtaataatgcaggccaagtgcctagtgcaaagcctgatttccatgaagactcaataaaagtcattactatttctatttttgaaatattatggttggaatttctatagataagcttttttagtttggccataaaatgaaacattgccaattctatacataattctgcatataagctttatatcctgaaaatatagctgctgtgactggctcagtagttgcagtcttacaaggtttgaagtggcatgaatgtccatataaagtagtaggcgccatattttttgtatcaactaagaaagttacaggctatgtatttctattagataaatgattatttgaggaactttcaaatgagagcccttctaattaatttcttagactcacagtgaaaggttctgacaaagtgctttgtgttttggtaaattatactctatcagacagaaatatgtctctcccacagaggtgtcctctctcctttctcagaaacagtaggcgaattgtgaccatatgttccatacattctcccagctataactctgctggcactaatggtatttatgtgccccagagctataaacctgttttaggtaaatgtatttactcagtaaagaacatgagtttctgaagactgcaataataaactgtcaacagtacgctaaacagtgcttatccactctctctcatctcttaagttgaggcttcctcctgtatgtctaaatgcttaggacaataaactgcatttataaaggacttgcagtgcaaaataaagatgaaccaacacgacttcaagattacaaatataatagaaggtattagccatcacatagggagtttaaaatcaaatccttgaaactcatgtaaatgataccgcaatacatttctgcacctcagttgtgcttccagaatgagtgatgtaagctttccctgaacaattgcttctgtatctgctaggaatacttttaattgcaagttttagagtaattaactaatagtgacttaaacaataaagatattatttcgcataataagcagtcttgaggaaggatgttcacaggtttggtgaacagctaccaaagactagacattgatggttatctttccagctctctcagcttttcctcatgatcacagtatagccaagcagcatcaagcttccaagcaagagaaaagggaaaagagcaaaagtgcttggtcatctttaagttgcccttccaggaagggcagtgcctcatttgatgtattctgattaaccagacgtgtgttacctgtttatccctgattctgttatggttgaaggagaatggagtcgtcatgatcacagtaaattgatcctgaatcaattattttgttattgtgatacattctctggagttgaacctagaggtctgtcttctgaaatattaagggaatgctgcctgtcacctgaataatctagggctctgttggcagctaagaagggaaatcactgttggctagacaatgagcaaggagcaacatctgccaccatgctgttaattcccgaaagagctagtgtgatgaaattgtccatttttaaaatggaaatagtacgaatatttggctcactgacagcataaagttttgggagaatgaattatatgctttataaactaagacatgctaattactggttcaatcttccaatttaagtttttctgctgttcttcccttaacctcagtgagtttgcctgtctttaataaaatcttcctaaatgtcaggtaacctgtctattccaacaggcaagaatttttcagtattgtctttttccctgaagtcagtagtaaaggaaaaaaagataaaaattgtacttaggcctgtagactacttgctgcaggttactcttttgtcaaataaatgagtcatgtatcttgacatagtgaagtatggtatcagtttacattatattttattctagcatcttgattaaaaacaagttagctatcaagccctaattcattttagggagacagggtgaattcattatactaagacttggggagcatttcttgcaaaataaagctatattattcactcagaaaaaaacatagagcctggtgctgcggtacatcatttttctatttttcctctgtcacttattaagttatgattctgtatgtacacagtaccttgatttgtttaagttacatggattctgtgctgctttgtaaatttcaagtctgcattatgcatgttttaatgaagaatgaactatgagtcccagggacagctctggttcagtcttgtcgcacttccagatgtgcacctggttctttattatgtctcacataggaagctggtaggtatctttctgagagcatcttgttaatgaatcaatttacagtaagatgtatatttaggggaaagaaagtagaattgtaattatggtaatggggcaaaacagcttaaaaatggaaaataaaccaggagtctagctgctgaaatgtgaacattgtgtttctctttaatttgctgttgtcttggaacctagctgtttatgcagtgctttcaccttctgttgcttgtctaagtgccaacttctttcccaaaggtgttcagtgactaatgctttggttacaagccagaatattttataaatgtctatttctgggcagctcttctacaagtcttaattaaactttaatgtcaagctgaagtttacttttagaacctcttaggttgctttagtcctaacatgattatagagtttggggtgggggggcaggatgtgggacagccatgttcccacacacttcctctctcccatttaacagtgccaccaagcagattcatactacttaaccccaaggtttacaacacaggcacgagtaaatcacagccattccctaaaatgttgtggtagcacactgtcactcagactcctccaccctgcagtgatacccagggtttggaattactgctttgttagttattacacattcttccagcatatccaactgctcaaatcagggatcccaatgtagagatgatgcatgtggaagtagcattctttcctttcttctccatgtctggaggagttatgaggactgggggatcattttctctaattctcatatggcttattggggtaaagaactgcatcctatgccatctgaaataatgaagcttctattatagtcagaatagtacaaaatagatttcaattaaatatggtaatatgttatatgtttattttgtaattaatttactcatcaattggattgctctgtagcaagagcctgcatttttttctgtgaagggacagatagtacatatttgagtttttgtgggacagagatctctgtcccaactactcaactctgtcactgcagtgcaaaagcatgtctgtgttctcatagagctttatttactaaagtaggcagacatgtgaatttggccttcagggagtagtttacagacctctactctatgatatgcttgctttttatatggaaattctaaagtatatatatttttattaattaaaaatagtgcctgatagtatattttgttttttaaacatagtttgtcaatataacttaggctggttgtgaaagtaagccaagattcaaagatttttaagaaattaatcctcagttaaaaaattataagaatctctcctagatagaaacaaagatagatataaatatgtatctagcctacagaattacgtgtgtatgttgaccaaaaaactataatagttccaaaaatggaaattgtcaaaagtcccatggataattgaaaggataaataagatgtggcatattcataaaatggactatatacaccaatgataagaaacattttacaactacatgtaccaatatgttaatctcacaaacaaaattttgaataaaagccatgcaaaagaacagatactcaaagattacattacatttatataaaatacaaaaccgaacaaaaccaagttatattattaaaaatcaaggagggtgaggacaataactggaagaaaaagccccagagggtttttcagtggtgctgctaatatttatttccttgagctaggtgcttaacgcatgtattcataaaaaatattgagctgtacaatcaggatatgtgcatttttctatgcatgtattatactctgataagtttaaaatagaaaaaaagaggaagaattttctagcattaagtgaagtgtccattttcttagaagttacattagagttataaaagtggggggaaatatccaaaattattttatttgcatattccgaggttcataagaataactctcaaaaaccgtaccacatttccagtttggattttgccatggtcatatgatgccattaattcataggtcatttcagtaggtttatcaccaccaaaacattaggttgtctggatgggggtacagatcgcaatgtggtaatgctagatatttactttcttagtgagacatttggaatttgtatagcatcacagaacagataaacacggtttaaggctataacgtgacagtatttatgctgatactttcatagacttctaacagtcaataacttatccaataatttccccaatttttttctgacatgttgcttggacaccaccgaacccttctttacatttaatacagacatgtacttacctgcttatattttttgaagactgtgttgttaggctctgagaaagcatgtgaatcacgatccagcatcttctccccaaggcaaattagtctagtagtgagaggaaccagagacttgacattgtgaaaatactgcatttttatagaggtgccccgtgtgctttgagagagggagaagctgccaccttacgctgttaggggagagcaatgcagggtgaaggtggttaacagtgagttttggctggaagaacaactgagaattattgacgtccaagataaatcttgaagaataagtacacgtcagatgcatgaagaggagatgttgacatcagagtgctagtttgaaggaagacgcaaaacatcctggtgtattagatgcctgtttatagaaaaatatgactgaaacaatgaattgtgcagtgaaagtgaagcaggggccaactctggagggcctctgtgtcatgctaaggagttggaactcttatcttgaaggcaatgtatggttctcaacagacaccattatctagtttgctttcttgaaaatgaccctctggcagtgtgaagactggattaaaggagaggagaaggacttgagacagataaatcaattagaaactcaatccaagtgaatttaggttcaatcatgacattttcagacttaaaatttcttgaggcagccaatttaaccatagtagtagagaaagaacaagtatcatgtctttactacctcaggcaaaaagtggtttcccagagccctctattcacaacacttgcccgtttgtgtatcttttttacatttatttacacatctgtcctttattatatcagctctaggaaggagtgaagtgtgttggtatttgggaacgatgaacttagtgcctgatttattgtacagaaactttcaattcattcatgaatcttcaagtaataattaaaagcagaaattttgaaacatgttcttaaactctgtccttacatactctgtctttaatcaattcacaaaaacaactaaattcctactgtatctttagtatttccataaatagtttattcaaacactaatcttctctacaaatgttgatttgaatgacacaatttaaacattattgaagaaactttctaaattctgcagtgctaggtggatatttatcttttttatctatcctcacctgatattttgctttgggtaaatgcttctctacttttaactaatttttctgaatgttaaattactagatatctaagaacttctgttcttaggggaaagtttataaaatgacatactgtattggaaagttttccttagcacatagctgttctaaccctctcactgggaaaaagaatgaactgtagaaatttgcaattgtttcaagacttcagaacattctagctgtggcctttgaataagttccttatgtctcaaatacttcatatttaaaatattttaaggactttatacagtatacataacccagatcttcagtgaatggtaggtagtatggaataggatgactgaggcttaaaaatgctaaattacttccccaccagaaagaactgctggcagtgccaggacttgaactcgtgcatatatatggatttacagcaatctatactttgcaatacacaggaggatgaagcatttctccagttctgtttttaaatttggcctagttactggtggaggtgaccagctgcttcacaatttaattctagtccaacagattttagtgccacgcacttgtgggtggacatagtagttcttcctcatgccttgctcacttctaccaagtattccttctagtcttcttttctaccagttccttccattttcctccctcggttcaggcagcagctagttcaatgtctattttaggcttgcaagaaagaaaagaaaaactgctttgcctttagaaaatgttacgaaataatcaggaaaatgttaaaattatagaagcaagaggttatgcagaaaagaaatgagaaaagatacgagtttaattatagctcattaaagtttccttgggtaataggtgactgaatttataaaaaacatgacaaagagttcttcttaatatggttttacatctgcttgcatagggtcaatcccatgattgtttttccaagaaaattagtattttatgttcagcataaattatatacatatatccttgtatgcatataagagagagggatttttatttcctaaacaagaactaaataatattacttaatttttaggccccatgaaaataaaacatatcttgctgttgggagtatgaagacattgatgttgaatgtgtccttgtttaatgctggagatgatgcatatgaaacgactctacatgtcaaactacccgtgggtctttatttcattaagattttagagctggtaagtactgtaaaccacaatagcatgatactacttggtattttacttaattttttaaaagtaaatggtagaattcacttcactgatttggggtataagtcttaatatttaggctcctagttattttcagacttactctgtgcccctgctcagaatggcaagttcttgggtcttaagtccaaaggcatcagcctcctgttttccagtactaggagtaggaggaagctgtttgggtgcctttacattctcactgccgtagccagcacacgtctgatgttggaacagtatccccttgattgtggtccttgcacaagtaacattgatcctccatcctggactccagagttatagttctttattttaaggtgacactcagacaattaatagaattttctctattctttatcaaattcgctcatcttttgtccagggaccacaccttcataccaatagtgacctttgacctctcacgaatatctgttaccttctttctctagtgtttgcgctacttgcaaaagtaacagtggaaactcagatattcacggacagtatttttaaagcattttatacttattgcaattataacctcattacacctattgagattatagctattttgattaaataccttaaacacattctcacataccagacagaagaggaccattaaaatatgaaccttatggattccttgcctcatgatttttcaaggaattcagaccctggattaaatagggaatatatcaagataaatgaaagctacaagtccagaattttttttttgtggagaatctgtttgaatactagagtacacacatatatgtatatacacacacacatacacatacacatatatatacacacacatatatacacacatatatacatacatatatatacacatacatatatacacacatgcacacatatttatatcatatgtctatttatctcaaacatataaatagaaaatagttttcctagaaaagcaaatacttctgggatgatattcttttcaataaccatccttaaacatatgttacaaactttttatttccttcctgtccaaaacagttgtttcatttttcccattaggaagagaagcaaataaactgtgaagtcacagataactctggcgtggtacaacttgactgcagtattggctatatatatgtagatcatctctcaagggtaagtgtttcatatttatggcttttgttcactatcatgaatatttttttctattcttccctatctttaggttgcatagaaaatattataaatattttagcttggggtaggtagctgagtgatgaaataaaactggttcttgaaatctttgagctttgtgtttatattcttggcaatgtttgctgttttaaagggggtggcatgtttacatcgaaatgggcatgtgcatgtgtcaatcagaattctgctccccctacacacccttcccgaaaacccccacccccaccgcaggtggtcctgtctgccaggcatgttacctctgctatacaaaaaggtgtttttggcaagagtctccactcaagttgtgaaagcatttctaattttgtctagacttgcctgcgttcacattcagagacgtctttgtctctgaatgttacgtgtggatatgtgtgtactttaaaatagccacaaacccaacaacttccctgaatcttattgccaagggaggagtagctgatgcctttacaatggttcaattctacattccatagaacataaacttttaagaaaaaaattcagattataaaaaatgtacttaagattttttttaatgggctttcctggtctgtgttttacagatagatattagctttctcctggatgtgagctcactcagcagagcggaagaggacctcagtatcacagtgcatgctacctggtataatttattgttaataaaatgaactagaaatatacccccatattctgaggggggggaattaggagaaccgtaaaactgtgttccattaattgtaagagaaaacttctcttacgtggtatgcttttaaaagaaccaaacaacatagttaaatgggagttactggcaatgttttagctcttgagctatgttaagtatttattagattagattagagtagacatgatgtgtcacgaatcaaactgtgtatttgaaatcaaaaacagaataaacagtttacaagtaataactctacaagatttaaaagtgagggtaatgacttccatagatatgtctcctagagtaaataggaaatcgttaatgactatttcatgagtgaagtttcaatatattttttaaaattcagaataaacgtcaagatggacttcattttacctaacacaacaacttggtcaccctctcatcctaaaaatctctataagtaaaactgattataaagatacgttaaggcagtacatgacttgctatacagtttaaaaaattatatgattgatgtgctttctttgatcattaagtcttgcaaaaatacttcttcaacctaaagagagtaatagatttgtttctaaactacctatttattctggtttttgtaccacctagaacataaatgttaaaaaatcttttaatctaataaatgtaactatttgttaaaaaaaaaaaaattcctctatctagcattagaagcaaatgataacagtttaaataatgagagaaattttctgccaaccttgtcctaaaaaatttttactaccatatctacttttatccccactcctcaaaaagcatttaagcaaacctctgagtatattaggtatacagggtatgtaattagttctctctgaagatttttctgcttggtgaattctaacagggtgttttctgtttgtatagtgaaaatgaagaggaaatggacaatctaaagcacagcagagtgactgtagcaatacctttaaaatatgaggttaagctgactgttcatgggtaagtagacataaaggcttcctttcaaatttagagctgatttacagtttccttgcttcttacattaatgaaaaaactgtattctagaatttttttaaaataaaaaggatactctatcttttaataattacctcattgttatagtcccttacttagctgtccattataataatccactctataatcatcactgatactacatcaaactagtacccagctggaggagatttcttactgtgagagccccaacaagctagcaaggccacactgagcctttcagctgtgcactgtgtaatcctaatctggaattaggcagtatgcagtctgcataatcatacttaatgcccatgtcaagtgtgaagttcagagaagtgtgaacttagtcaaatcactattctgcagacccgtatctacacatgtggcaaatggattgagatgtgagagatctggctgcaaggtgtcccttgtccactttttatacctatgggatcaccagattcctcaaccacagtatcagaattcattgcttcctcatgattttaatgattgagtggatccccctctcattcaagaaggagatgtgtggagaaagaataaaagggggcttacggaaaccttcagtaattccactagaacttattcatggtgttagtccttaaaactacatttttatgcagtagaagatatgagttacagaacaaatagacagatgagcctttcctgttgctctaaatctaaaccatcccgcagtcatcttatccacttagaaaggtgatatacagtcatgtaaatgtaaaatgtcagtgtctgatggaattgagtatcaagtttgagataaagcaaacgggtgaaaaaaggccattcacaggagagtaagacctagagaatcacgagtaagcaaataaaaagttcattgcgtgtttcctggttttcagtgtttatcttgccactcctcctggcttatgatgagtgtcttcctatttttctgttattcacatctcattattttgaacaaggtatgttcacctgttaaactgcctaaatctatgctggttactttcctgtttcatgagtttctaatttggtattacctaatattagctgccaaatgtgagcaccttatggagtagagatctccctagaaacatatttcttagagtttattgcagataaaaatgtcaaatcacaggcctttaaaagagagtgacagccttgtattgtaacaaaaaatttatcatacttaataatgttagacttgttccccagatttggggttcattataagtagccagcagggatcatgagatgggaagaaataattcaaaaatgggtaacataaattgaggtatgagaaccttaggaaaaaactaagaagttatcccacattacatttgccaaatttacatgaatcacttaagggctgaaagagaaggaatggtcagtagaatgaaaaaggtgtagtgtcatggaaagcaagaaaagaatatcggtgagggacagatattgtcacccaggtcagagcacatggccttttttttttttttttttttttttttttttttaagagtctcgctctattgcccatgctggagggcagcggtgtgacctcagctcactgcaacctctgcttctcgggttcaagcgattctcctgcctcagcctcccgagtagctggtactacaggcacacgccaccacgcccagctaatttttttttgtatttttagtagagattgggtttcaccacgttggccaggctgccctcaaactcctgacctcaggtgatgcgccctcctcggcctcccaaattgctgggattacaggcatgagccactgctcccggccctaatttaatttctttttaaataaaatgtatatctgaccacaaaaccaaaagtattccatggtgacttgtaaatatgctataatccagactatagaaaaagactctttataatacgtcatcgaataagacagttaattaaatttgaatttgtttttaccaggtttgtaaacccaacttcatttgtgtatggatcaaatgatgaaaatgagcctgaaacgtgcatggtggagaaaatgaacttaactttccatgtaagaaaagttaattgtgttaatatttgtaacaacctaaaaggatgtcactgatgcattgctccaagggacattgtacacctatgacgtccttcagcctctgcagaccacagctggctggaatggggcagcagcagtggtactcctgcctctcagacccctgctgctttccttccacttgtcttgtccctgatattcaagcccatatttccttacaggacaggtgagaaagagcatgcaggaacagagataatgcctgaaacaggcaaagttatgggatgagctgaatttgctagagacacatacagaaaacaggacaggccaagggaaggcatctttgggtgcaaatcagtgaaatttcttcttggttcaagcgtataaaaacctcagcactacaaagtaaaggaggctcttacctcccatctccatttaagatcacgttggttagcctttcaagccataagtttatgacctgtgacaagtgctttatcaattattaaataaccttttaaagtaaagagtactatcgtaattcagaagtattaggagactgatgtaaacctaagtttttaaaaacattttttgctgtcaaactgatatttttattgtatcaaagatgttggtgattagtaaatataatttccaaaaaaaaattctttgaaccaaaagcactgtccaagcattcttatagaataatctatatttgtgagtaaatcttggattaggtataatattttgtaagacaatgcttttcaaaatgtgtattagaatcacttggggtacctatccagaatgcaaattccttggctttgccccaaatctgtggaaaaagaatgaccttgaaatcctgttgattctatgtatactccaatttttgttacactagttgatactaatgttgaaaaattttagttctccactttgaagtcccaagaaatgctctttaaaacccaatgggagtttgtgctttgataaactaaaacagaaaccaaaccggactctagaatgtttatttattaatttacaattaatagttaaaaagtattttctactaaatgtataatgtagtgactggcactggagaaacttgcagtatataggatttctgtgtctagtcaactatgtagatattcttagaggtttaattgttgttaggcaaacagatgtttgtgatttagatatttaatggcatccagaagaccttgtctgtagtattgggcactgctaggtatctgttgctgacatttcctgctgcaactgccctgtgcttttatggattagcaattaccacctgttcccaatttggagacactttcttcatctatgtcacatgcattcataaaatgactgcaggtctgcaagtcatcttttttaatcgaggtattgggatgcatctctttctgacttactgtattggttttacagttaagctgccagttcagtaggctatattttggccccatttcccttttcaggaatcttcaatccccaaatttatcatcctcttatgcattttttgacaagtattgttaaaaaccttttgtgctttctcaaaacccaacaacatacttttcttctgaatgcatcagcatatagatcctgaataaaaatacatttttattcactttctcctgctgattatccccttagcacagagtgcttttgcgataacatcataggatttagaattacaatacctgagttttggtcataactcttgtcattttttaacttttatcttgggaacactaagaacacctgttagcatttcccttagctggtgaataccaaaatgttggcctacctcatgagaaccaaatgatatttttaaaatatgtaatgtaacatacaaatatatattgtttatgtctcctaagactgtttctccaataaaccatcagcctgtactttttgttttcaacaataccaaaactagaaggttagaaacaatgactcatttgaaattattagcaaactttaaaaattctgactatggatatcctgtctccctttgttatgcagctgccaaccataaacctccaccactataaatgttgcatggaatatacgggatcacctaaaagctcactgatatctgtacttacatttatagaaaacatttaatttgttaaaaaatttttccttcttatcaggttatcaacactggcaatagtatggctcccaatgttagtgtggaaataatggtaccaaattcttttagcccccaaactgataagctgttcaacattttggatgtccaggtaaaaatgtatttcttccatctaacctttattgtgtgtcttaaatactaaaataaatgcaaaccaatcctttattcgagtaatgatgtgaaaatggataattgttaacttacttcagtcacactctaagctatgaattcaccatgcatttattgagttatgctttgaatattatacatttctttagaactatagagttacagtgcaacttttacatttgatttaaataacagaactatattctaccatctccattgaataattattttaagatacattgttgtgtgatatggacctatagaggtaacttctattagtagaattcttcataaaacttgaaactactgtgcaaatatgaggattatagcctttttttaaggaagcactattcaaaccacttcttaagaaccgatattcttgcactgatggttccatcagaattgttttgagcttaacaggttgaagacaaaagtcaacaaatctactaaataggtttgaggtctgatttttaaaaatcctatttaaattccagatttagagagaagaatatggtgttatattgtttcgcctataaaggcaaagaaatatttaatgtcatgctaatgttccaatatcatttttcacatttctgcaaggttaaggccattttatcagcttagaacctatatccaacctgctgtaatttggctgggtttttgtgtttctgccacagacatttaatcactcccaaatctgtcaaaaaaatttctacaatttcagaggtacttgatatattttagcaaagataagctactggaacttttaaaaccaggttgctttttgctgttttttccagtgttgaaagataagatttctcttgctttctgtcttcatagactactactggagaatgccactttgaaaattatcaaagagtgtgtgcattagagcagcaaaagagtgcaatgcagaccttgaaaggcatagtccggttcttgtccaagactgataagaggctattggtaagtttcagtttttcaggttgtagttcctgctttccaacagagaagtgagacacttaaaatcaagtcaatgggtttgagctgtcacttcaataataagagagaagacaagtttaggtagtattcttgcgtggaaggaacaagcatggttggaaagttgagatagacccagggtctatcccatatataaacatgttggccgggtgtgatggctcacgcctgtaatcccagcactttgggaggccgaggtgggcagatcacaaggtcaggagttcgagaccagcctggccaacagagtgaaaccccgtctctactaaaaatacaaaaattagacaggtgcctgtaatcccagctactcaggaggctgaggcaggagaattgcttgaatccgggaggtggaggttgcagtgagccgagatcacgccactgcactccagcctgggtgacagagcaagactccatctcaaaaagaaaaaaaaaaatgttatacagtttcatttttttatctaacaaatgcccactatttgccaacaagacattgttccagacccttcaggacaccaagaggttgtcttcacctgggcagcctttgtggcatgggttaattttcattcttttcagcttagtgaatgtatgaaaagaaactggagaagcattcatcaccttgaaatgatccacgttttacaacaaacaaagaatacgtaacttagcaagactctgattaggaacattttttaaaaattctgtcccagaagattatgttaatacaaataataagaacatatgctgcagtttaaatactttattataatttagaaaacaaacattcatgtcttgtttaaaggtaatttaaatgccactaaggaaagcagatgtttaatttcatatttatggaaagatgattttcaaaatgccattagagtatatattaaattctatataaaatattttaaaaatattttccaatgttgaaaattttaatgtagcacttttatattcccttcaagtactgcataaaagctgatccacattgtttaaatttcttgtgtaattttgggaaaatggaaagtggaaaagaagccagtgttcatatccaactggaaggccggccatccattttagaaatggtaagtaagtctaaaacattgacaacttggtggctaagtttacataaaatctataaattcagtcatataggcaggatagtatgaaggcattcaacaaattaaattttaaataaaattttggagtaaaactctaaaactgtatttctatcacttcaactatctacattgactaagtgaaatggctttagaaattaacaggtaataaaggctaaaataggccaggcacagtggctcatgcctgtaatcccagcactttgggaggccaaggcaggaggatcacttgaggccaggagttcgagaccagttgtattcctaggtagatgtctggtgttatttctgaggtctctgttctgttccattggcctctgtatctgttttggttagccttgtagtacagtttgaagtcgggtagcctgatgcctccagctttctttttgcttaggattgtcttgactatatgggctcttttatggttccataggaaatttaaagtagttttttctaattctgtgaagaaagtcaatggtagcttgatgggagtagccttgaatctgtaaattactttgggcagtatggccattttcacgatattgattcttcctatccatgagcatagaatatttttttccatttgtttgtgtcctcttatttccttgagcagtggtttgtagtgctccttgaagaggtccttcacatcccttgtaagttggattcctaggtattttattctgtttgtagtgaatgggaattcactcatgatttggctctctgcttgtctattattgtatacgaatgcttgtgacttttgcacattgatttttgtatcctgagactttgctgaagttgcttataagcttaaggagttttggggctgagaccatggagttttctaaatatacaatcatgtcacctgcaaacaatttgacttcctctcttcctatttgaataccctttgttgctttctcttgcctgattgccctggccagaacttccaatactgtgttgaataggagtggtgagagagggcatccttgtcttgtgacggttttcaaagggaatgcttccagtttttgcccattcagtatgatattggctatgggtttgtcataaatagctcttattgagatatgttccatcaacacctagtttattgagagtttttagcatgaagggatgatgaattttattgaagcccttttattttaaaaatatagctaagaagaaaaactaaggctttcataaaatcaaataaaatcaaaattcaacaacaaaaacatatttaaattttaaaaataatgaaatatatcttggactttttcctacaaaggagcatgtatatttatgaggagtagtttgagatgaaactagttttatgtggagttctgtttttcagctttctcatctgttcaatatggataaatgagatgatttttataagcacttagttcatggaacataggaagccaaaggaaatggcagctgttatgttcaagtggaattcttgaaattgccaaacagtgcttaagaggaagatacactagacaggcaaagaagaaatatccattttagtttcaactgtgctaaaagcaaagtcattgaaccatcagcaagtcatttaaccttttgcagtttgccttatctttttctctaggtctaggttttccatcagtggccataattggcattttgaaccagataattttgttttggggggttgtcctgtgcattgtaggatatttagtatcatcctcagcctctatacgctcactgctggtagtaccacctcccacgttctgacacttgacagtttctttagacattcctgactgtcccttaggtgataaaaccctccctgctgagaaccactgctctagatctataggaagcttgtcatttttggctctaaaatgttaaataacatttacacaatagttttaaaggtcatatccctctttaagaatctgactaaatatattctcatctccctcagcaaatgcacacatgaaaacatctcctaaagattcttagaatttataaagcccttctacagatccccaagcttcatggattctgcgttataaaatccttgctttagatagtaaagttctgagttcatccactgattttatatttgaattctataatgtatttaatttagaaagaaataaaaagcccaaataagatagattcaatatgcggtggtggggtggagaacaatggtaaatggtaacttacctctttctgtagtctaatatttaaatcaagttatttgcaaggtagctgtttaatcaaaggatttcaataaaatgatactatataaattaataccaagaccacactttgggaaccaaaggaggcactgcagttaattttaagtggtgaaataaattggggaaggtaaattgtgaaaacctctagctagaaggtaaagatcctgataaattatgtctttatgaaataaaccaggctatggtgatccttcttttattaaacaggatgagacttcagcactcaagtttgaaataagagcaacaggttttccagagccaaatccaagagtaattgaactaaacaaggatgagaatgttgcgcatgtaagattaccctcttaactgctacattaaaattataggaaaacacatttcaagggtgtctataattacttccttctgagtaactgagttgggaaagtagagtgtgaccagctcatggagggcccccaatacttggttgagagttggcattttccacaactggcaggagggaacaatacagcagttctttcagagaggtgaattgggcagcagtgagaattgaatagattggaggaaaagtcatggatacagcccattacactcactgtttctgctaaacagttaccagtgtttcctgcaattatattagaaccagcaagaaaatgggctgggcagttctaaatactactggggattatggcagggctttaaaggaaatataagcaacgttttaaactgatttttttttttggtttttgagttttatttttcttaactcacgtaggttctactggaaggactacatcatcaaagacccaaacgttatttcaccatagtgattatttcaagtagcttgctacttggacttattgtacttctattgatctcatatgttatgtggaaggtaagcatttaacaattaccaacattagtctactaaaaatgacattttctcaaagccaatttgacttccaagttattagatttaaatatttcactatttgaatgttaactttttatgttgctcagtactgatctcacatttctcttcaacaccaaagtctttctagaaaaatatgcattcttaatttgttttgaaagacagacgttccttttaaaaaaccatttggaaaagattgcaaattacacggaatgtcaattttggagagaatgtggtgtgtatcactgagaatttctgcattaaaaacaaaaatgtttctttaacccagtatgtccccactaatttttactgattacctctgttaaacctttatgactgatgttacaagggatgcagtttaagaaatattggtgttaactgcttagatattagaaatgagtatagtagataagagagtgttcataactatacactagtgattatgttatgctattttcaggctggcttctttaaaagacaatacaaatctatcctacaagaagaaaacagaagagacagttggagttatatcaacagtaaaagcaatgatgattaaggacttctttcaaattgagagaatggaaaacagactcaggttgtagtaaagaaatttaaaagacactgtttacaagaaaaaatgaattttgtttggacttcttttactcatgatcttgtgacatattatgtcttcatgcaaggggaaaatctcagcaatgattactctttgagatagaagaactgcaaaggtaataatacagccaaagataatctctcagcttttaaatgggtagagaaacactaaagcattcaatttattcaagaaaagtaagcccttgaagatatcttgaaatgaaagtataactgagttaaattatactggagaagtcttagacttgaaatactacttaccatatgtgcttgcctcagtaaaatgaaccccactgggtgggcagaggttcatttcaaatacatctttgatacttgttcaaaatatgttctttaaaaatataattttttagagagctgttcccaaattttctaacgagtggaccattatcactttaaagccctttatttataatacatttcctacgggctgtgttccaacaaccattttttttcagcagactatgaatattatagtattataggccaaactggcaaacttcagactgaacatgtacactggtttgagcttagtgaaattacttctggataattatttttttataattatggatttcaccatctttctttctgtatatatacatgtgtttttatgtaggtatatatttaccattcttcctatctattcttcctataacacacctttatcaagcatacccaggagtaatcttcaaatcttttgttatattctgaaacaaaagattgtgagtgttgcactttacctgatacacgctgatttagaaaatacagaaaccatacctcactaataactttaaaatcaaagctgtgcaaagactagggggcctatacttcatatgtattatgtactatgtaaaatattgactatcacacaactatttccttggatgtaattctttgttaccctttacaagtataagtgttaccttacatggaaacgaagaaacaaaattcataaatttaaattcataaatttagctgaaagatactgattcaatttgtatacagtgaatataaatgagacgacagcaaaattttcatgaaatgtaaaatatttttatagtttgttcatactatatgaggttctattttaaatgactttctggattttaaaaaatttctttaaatacaatcatttttgtaatatttattttatgcttatgatctagataattgcagaatatcattttatctgactctgccttcataagagagctgtggccgaattttgaacatctgttatagggagtgatcaaattagaaggcaatgtggaaaaacaattctgggaaagatttctttatatgaagtccctgccactagccagccatcctaattgatgaaagttatctgttcacaggcctgcagtgatggtgaggaatgttctgagatttgcgaaggcatttgagtagtgaaatgtaagcacaaaacctcctgaacccagagtgtgtatacacaggaataaactttatgacatttatgtatttttaaaaaactttgtatcgttataaaaaggctagtcattctttcaggagaacatctaggatcatagatgaaaaatcaagccccgatttagaactgtcttctccaggatggtctctaaggaaatttacatttggttctttcctactcagaactactcagaaacaactatatatttcaggttatctgagcacagtgaaagcagagtactatggttgtccaacacaggcctctcagatacaaggggaacacaattacatattgggctagattttgcccagttcaaaatagtatttgttatcaacttactttgttacttgtatcatgaattttaaaaccctaccactttaagaagacagggatgggttattcttttttggcaggtaggctatataactatgtgattttgaaatttaactgctctggattagggagcagtgaatcaaggcagacttatgaaatctgtattatatttgtaacagaatataggaaatttaacataattgatgagctcaaatcctgaaaaatgaaagaatccaaattatttcagaattatctaggttaaatattgatgtattatgatggttgcaaagtttttttgtgtgtccaataaacacattgtaaaaaaaagaatttgaattgatatctaaaaacagaatttgaattgatatttcatcttgacttttaaagccctagaggctaattgttagtaacatcaatttctattaggatatccgtttggccacacagcaggaggttagagcaatggagcattactgagttcctccccctgtcagatcagcagcagcattagattctcatagaagtgcgaaccatatggtgaactggtatgtgagggatctagagtgccatgttcctcaagagaatctaatgcctgatgatctgaggtggaacagttcatcctgaaaccattcccccatccacggaaaaattgtcttccatgaaactggtcccaaaaagggtggggaccacaggtttaaagcatggccacatttctttatattaaaattctagtttgtacatttcttttagaaacaattacatgttactttggaatcatttcttccatgcttcctccataaagactgataagtcttggatgcaatctgtaaagaaaatacattatttcatcaacttattttgttgtttttcacatacacctaataagtatggtacacaatgccaatgccaaatacaaattgataacaaacacagcattcccaacagagctgtaatctagaaaactgagaaggtctgattgataaatcatcaacaacaataattgctctaaaacctccttaactgacttccttgattgtccaatgctctccattacctctgtaaaacagtcagttatgcctctagaacacccatgtctagtgggcacccctgcatgcttcttctaaccactgagtgtcacaatgcctaccaagaatgcgtttgcaggttcctaaacctgtttataccagttgctatgtaaaattgttcccaagggaagttgaatgctctgtaaaggcctaataaaagcaaattactgaacaaaacatgttacagtaattatgagtgagaggaaactaagatggaaggataaaaatctaacactttactattcagatggctccactaaaagatttaagatcttgatccatttttaaaaatccaaaatggaagttgtagacattatctgtagtttatgcacaacaataaattagaaagccaatgtagacacgcataaccaaagaaaatgccttgggtctacataacagttgaataaatgtaaagttgctttttatttattgaaa

SEQ ID NO: 162 - DNA, 13044 bp, Homo sapiens
tccggtgactgactctctgtttccattctggcaaagtggtttgctcttttcactctgctttgggtgttgaaggaagacgagcttctcacggagcctctcttgagcctcttggcagtttccccctctgtgcccctcacgtttccaccagaaacgtgaaggcagaggccacagattctccctgagccacctcacttggaagcaccatgtccggatgagatcgcacttcctgcagtgggcattagccacgtccaggtagaaccaaacctgttgcttttgtatgttgggtcaacttggcctgacgtttcagaggtagacacgagatagggagtttgttgcgggggtggggagaagtggtagacatgctggctaactgattatgattaagagaaacttagaagctgaagccagagagcatctcaaaggttcctgatacaatggatggtgtcactccaaccctttcgacaatcagagggaggaccttggagtccagcactctgcatgtgactccccgcagcctggacaggtgagtgactcagggtggtgagctccaccctgccctgatttaggcagaaggtcctagtccacccttaggagcttcttacacagcagtgctgccacctctcaacacccaggctcggtctactaaaccaccaaactctaggcttggaggcatttgctcaggggtgctagggggaaaggaaggtattgaggaaagaaagaaaatattgtggtagaggaaaaactgtgataacactggcccttaaagctagttgcttagactggttggatttctcacctctcggaggccctgaaccctatcatcagtctttcctaggtgtcaccatgacagaaacaaaaggctgagttttccaaggatgtgttttgagatccaaaaacttgtcatgaataaaaaatgtagtgatagatgtaataaagatacgtccttaggacgtaaaatcttacagaactaatcatgggtatgaattactgctactactttcaatctcatacaaacaaaattaaaaatccatccacagttgaaactttaaaaacattggcagctgactgggcgcggtggctcacacctgtaaccccagcactttgggaggccgagtggggcggatcacccccactcttgaaccagcctggccaagaccagcctggccaacatggtgaaaccccgtttctactaaaaatacaaaaattagccgggagtggtagcatgctcctgtagtcccagctactcaggaggctgaggcaggagaatcacttgaacccgggaaacagaggttgcagtgtcatgtcattgtactccagcctgggcaacaaaagcgaaactctgtctcaaaaaataaaataaaattgcagtcgtttggggaaataaatgttattatcatggcaaacacatgtcacttgctggtagatatgagcatcaatgagcaatgaatcagaagcctgaagcatctctccaaaactatttcttcatttatttttatttatttctaattggcaaatcaaaattatatatatttatcatgatagcctgttgttttgaaatatgtatacattgtacaatagctacattaaactaattaagatacacattacttcacaattttcttttgtggtgagaatacttaaaatttctcagcaattttcaagaatatgacacatttttattaactatagtcatcaacactttttttgttttgttttgtttgttttttttatttttatttttttagacagagtctcgctctgtcgcccaggctggagtgcagtggcgtgatctcggctcactgcagcctccacctcccaggttcaagctattctcctgcttcagcctcctgagtagctgggattgcaggcatgtgccaccacccgcggctaacttttttttgtatttttagtagagatggggtttcttcatgttggtcaggctggtctcgaactccctaccttaggtgatccgcccacctctgtctcccaaagtgctgggattacaggcatgagccaccgggtctggaccatcaacacatttttattaactataggcatcatgttatacaacagatcccttgaatttttctttctctctaactgatattttgtaccctttgaccaacatctctgcaacccctccctggtaaccaccattctactctccacttctttttttttttttttttttttgagacaaagtttcactcttgttgcccaggctggagtgcaaggttgcaatctagggtcactgcaacctccacctcccaggttcaagcgattctcctgcctcagcctccccagtaaatgggattacaggcatgagccaccatgcctggctaattttgtatttttagtagagttgggggtttctccatgttggtcaggctggtctcgaactccttacctcaggtgatccgcccacctccgcctcccaaagtgctgggattacagacatgagccaccatgccccgccttggtagttctatttttaatttttgaagaacctccatagtgttttccataatggctgtactacacttaaaactatttctatattaattcatttgtttattaattcattcatttaacaaatatttatcagggccctactaagtaccaagcactgtttaaggcactaggtgaacaggataaacaagtccataacctcctgaagattatagacaagtgggagagtcaaataatgaacagagctgagcgtggtggctcatgcctataatccaagcctttggtagaccaaggcaggaggatcaattgagcccaggagttcaaaaccagcctgagcaacacatggagaccctgtctcaaaattttttttttttaaataaaaaaatgataaacagataagcatatgaatgtataatatcaatcaatcgggctgggtgaggtggctcacgcctgtaatcccagcactttgggaggccaaggtgggcagatcacccaaagtcaggagttcgagaccagcctgacgaatatgatgaaaccccatctctactaaaaatacaaaaattagccaggcgtggtggtgcgtacctgtagtcccagctactcgggaggctgaggcagaagaatcacttggacccaggagggggaggttgtggtgagccaagatcatgccattgcgctccagcctgggaaacaaaagcgaaactccatctcaaaaaaaaagatatatcaatcagtcatcagtgctatgaagaaaaagtggagcacagcaaggggactgcaagtaatagggtgtggccatggaagacgtgtctgaggagatgacatttgacgtttcagaagagacctgaatgagagggactcagccatgcagacagctgggagaggaggattcctgggagagggagtggcaggtctgacacagaactgtgctctgcatgggcaagggatcctggcagtcaaagtcagagggaaagtggtaggaaataaggtcagaggtaagcagaggccagatcatatcgtgccgtcaagtcctctctgaggaaggactatagactttattctaagtcactcgaagccggggagagtgatgagtagaggagggatgtgatctgatttaccatttagaattatcacactggtttttgtgtgaagacaacgaatgttgaggccaagagttaaagcaaggagaccatccaggaaagttattgcaaaggttcctgtgaaatgcacagcagcttagacccgagtggtggcaacagaggagcaagaggtggttgggtttgggataaatgcccagggtaatgcagccagaatctgctggttgactggaagtggggcatgaaagaaaaagagctccaagaatggctccaagatttttgactaagccattagattatgggaaacacctggggagtagcaggtttatgtggggagaacaggagctctgttttggtttgagctgtctgttaggcaactagttagaaatgctcactagaaacttggatgggctgggcgcggtggctcacacctgtaatcccagcactttgggagactgaggcaggcggatcatttgatgccaggagttcaagaccagcctggccaacatggtgaaatcccatctctaataaaaatacaaaaaaaattagccgggcgtggtggcgtgtgtctatagtcccggctactcaggagactgaggcaggagaatcgcttgaacctgggaggcagaggttgcagtgagccaagatcatgccactgcactccagcctgagcgacacagcgagactctgtctcaaaaaaaaagaaagaaagaaagaaagaaagaaagaaagaaagaaagaaagaaggaaagaaagaaaagaaaagaaagaaagttgtataaataagcctaaaactcaaggggacaaaaaccttccctgttaaatgccctggtttctaataattgggggtagcacgtcagttcctgattcccgctgtaacttcagttggcagcttcctgttgcattaggcatagccatctggggttgtaatcatctggatgcatttcaacacccaagcaaaaccgagcagtgacgccagccctgccagggaattgcaaggtagcacagaacatgaattggttaaacttcacacaacagcagtgtgttgcttggagaccagctccacaaattggtgcgggggggggggcggcggggggtggggggtgttattcaagttcatgcaagctggactctgtcacagagccactccttaactgtacgttggctaatcctctcctccaagcaagccaggaagcccacgagtagggaacaagaaggggcaaggccaaatgactttgactttgcaggtttggaggacagtgtggcagagtggaaagagcatggtctttggacgcaaacagacctagattcatattccttctctgctccttcctacctaggtgatctctgacatgttactttacctttctgagtctaaagctcaggttacttggccacaaagtgtgataggattgttaaagattaaataagtttcacaggccgggcacggtggctcacacctgtaattccagcactttgggaggccaaggcgggcagatgacaaggtcaagagattgagaccatcctggccaatgtggtgaaaccccgcctctattaaaaatacaaaaattagctgggcctcatggcacgctcctgtaatcccagctactctggaggctgaggcaggagaatggcttgaacccaggaggcggaggttgcagcgagctgagattgtgccactgcactccagcctgggcgacagagaaagactccatcaaaaagaaagaaagaaagaaagagagagagagagagagagaaaggaaggaaggaaggaaggaaggaaggaaggaaggaaggaaggaaggaaggaaggaagaaagaaagaaagaaagaaagaaagaaagaaagaaagaaagaaagaaagaaagaaagagattaataagtttcacatgtgaatccctggcacccggtaggcatttgaaaggaatagttcccttctcccctgtccaagtcccctctctccataaagtcaatattcagagataaccctctcttccaccacaccccacctgggctttccttcactcggctcccattccaaatcttcaggctctaactccaaaaggaaatgtctcctccagcctctccaccctcctacagctagcacatgtcattcgattgtttttctagaaataaagaccagatcaccaacatcttttccgggtttgcgggactcctcgccatcctcctggtcgttgcggttttctgcatcttgtggaattggaataaacggaagaagcgtgagtcccttgtttgtcctgagttgagacacagtaggattattaatctaggctggaatttaaagcccagcttatttaccagggataaactattggcctggggagtcctcagttcttacccgatacattggccattgcctcactcaagatcctgaactgtggctccaaaagcccagtgctgatggagttcccctgggaaagacattgccctggtgcccctgtgtccagtttcctctttacgttctgtccatcaagtcccctgttcctctcactcaaatgaaaattcctgtagcttgagtctgaaagggtatttttgtgagaactggcaaggatggggagcattttcaggggccatctcattcccatgagtctcttcactctgtgcagctgacccccgccatgactcccatctctctcattgccttgcaggacaagttccttacctccgagttaccgtcatgcccttgctgactttgccacaaaccagacaaagagccaaaaatatttatgacatcttgccttggcgacaggaagacctgggtaggtttttccttctaatctatggagtccagatattcgaacttctactcccagaatgtgcctctcaccctccagaagcaattttctttaagttctcaaacctgtttgcccttcagagagtatcagggagaatgggatagatagactgtcagctgcaactccaggggggtctggagggctccaaaaagggagcagagggtcatctgggctgggagttttgttttttcttaatgttaaggcaacagaagaaagccaagtgtgtccaggcatagggaagacaccaaggaagagaactcggtgccagcatcacaggcagaggatggggcagggaggaggttctcacacaggagcttgtttctcagcctcccaacccctgtgatagcatcctccagtgccacagaagctgaggggcttccggttctcagagtgtcatccccataactctgacctcagaacatgagagaacaccagacccaaggctggaaattccagacaccacgcaaacccgcttcatccatgatgcagggattatttggactgaagcactcagaggactggctatcttcaggatttgttctctgtcctttcagggagacatgagtcgaggagtatgcgcattttcagtactgagagcctcctctccagaaattctgagagcccggagcatgtggtaagagtcaagcttcttgggagaatgacatgtctctggcagaagaactgcggggaaagagttatagggcttagatctggtttcactgcaaacaaacagcatgccctttggcactcgccctgcagtcctattaataaattgggaagactagcctcaggatctcctatacccaaaaagaaaaattaaggacagaggcaagtgcttggagttataaaaagggcaccagggtacagatattcaagtgcataatgtcagaactaaaattgattggtatatttttttttcttttttcttttttgagatggagtcttgttctgtcacccaggctggagtgcagtggtgcgatctcggctcactgcaacttctgcttcccaggttcaagcagttcacctgcctcagcctcccaagtagctgggattacaggcatgcgccaccacgcccagctaatttttgtatttttagtagagacggggtttcaccatgttggccaggatggtctcaatctcttgaccttttcatccacccgccttggcctcccaaagtgctgagattacaggcatgagccaccgtgcccagcattttttttttttctttttttgctcactccaacctctgcttcctgggctcaagcaatcctcccacctcatccccccaagtagctgggaccacaggcacacaccaccacgcctggctaactttcatattttgtgtagagatggggtttcaccatattgcccaggctggtctcaaacacctgagctcaagcaatctgcccgccttggcctcccaaagtgctgagattacaggtgtgagccaccataccctgccaattgattgttttaacaaagacatgacaacatgtttattcaaatgaatgttgctcctttcaaagtgatcacctcaggagggtatgcaaatattccaacaatgccattggtgctcaaaacacacttaaaaacctgctttggatattacttgcagggcttatgtcaattatttcaattaccctcaggagcagaaatatctgttaagtcattcagcactgtagctgatatagaaagtgtttgatcaaatgaggttgttataggaccaacaggtttgtgtgtctgctgcccggtaacagaacatacactgtcactactaaaaatacaaaatattagtcgggcagtggtaggaggcacctgtaatcccagctactcaggaggttgaggcgggagaatcgattgaacacgggaggcagagattgcagtgagctgagattgctctactgcactccagcttgggcgacgagagcgaaactccttctcaaaaacaaaaataaaaacaaacttatgatgtaaatattatgataatcttcattttataaattaggaaatgaagacaccgagagattaggtcaggtgctcatactcacttggcacaaagtggtgaggctaggatttgtacctttagtctaagcctcacctttagccactatgttgtactgcctctcagtgggctcttcagttgataatattttcgtcccacccgcacccccccaccaattgattcccatactgtggccaaaaactagttgtgatttatcatcacatttgcactgttgctcttcttttttttttttttttttttttttttttcagaatatgccagtggtattttccaagaagaaaggctttgtccatatttctgcttgcatctgaccactggcttccttttcttcttcatagccctcccaagcaggcaatgccttccaggagcatacagcccacatccatgccacagagtacgcggtgggtatctatgacaacgccatggtcccccagatgtgtgggaacctcactccctcggcacactgcatcaatgtcagagcttccagagactgcgcaagcatttcttcagaggattcgcatgattatgtcaatgtccccacagcagaagagattgctgagactctagcttctaccaaaagcccttccagaaatctctttgttcttcccagtacccagaagctggagtttactgaggaaagagatgagggctgtggagatgctggtgactgcaccagtttgtattctccaggagctgaggacagtgattcactcagcaatggagaaggttcttctcagatctcaaatgactatgtcaacatgacagggttggatctcagtgccatccaggaaaggcagctctgggtggcttttcagtgctgcagagactatgaaaatgttccagcagcagatcccagtggaagccagcagcaggctgagaaagatgtgccatcctcaaacataggtcatgtcgaggacaagacagatgatcccgggacccatgtccaatgtgtcaaaaggacattccttgcttcaggggattatgcagactttcagccattcacacagagtgaggacagtcagatgaaacatagagaagagatgtcaaatgaggactccagtgactatgaaaatgtgctaactgccaagttaggaggcagggactctgagcaggggcctggcactcagctccttcctgatgaatgaagacccaggtacccagccataaagccacattgagtagtctatcccataggattgactactgcagagtctagtgcagacccgtgatcaccttagtgcttcagtggattcactggttagattaaaaagaggctgagatgagcagtgaactaagaggccacacaaaagcagaggtttgggaattccagaagggaattcttctcaagcagagtgtggttatctcctgtaccagcctaagaatgtttgctgaaactgcttcctagaactgtgaagaaagcaggaaagtagtgcacagtagtctaagattattaccttcattaataccaacaggctgcaaagcaagagtatagattattgtataatccagtcagaggtcaaaaggaaggaagaagttggagtggagtggggtgggcaatttccattttaaagagtgtaggcaggccaggtgcagtggctcatgcctgtaatcccagcattttggtaggccgaggagggcagatcacttggtgccaggagttctagaccagcctggccaacatgacccatctttactaaaaatacaaaaattagccaggcgtggtggtgtgcccctgtaatcccagctactcaggaggctgaagcaggagaatcgcttgaacccgggaggtggaggttgcagcaagccgagattgtgccactgtactccagcctggtgacagagcgagactccctctcaaaaaaaaaaacaaacaaaaaagaagtgtgggcaaccaaatgtaggtaaggatgaagaagaacaggaactctcactggtggctgatgggattgcaaagcgtcagggcagctttgaaaaacttttcagcagtttcttataagcataacttatcatatggcccagccatttcactactagaaattgacgcaagtgaactgaaaacttatgttcacacaaaaactcgcacatgactgtttatagcagcttcattcataattaccaaaaactagaaataacccagatatccttcaacaggtgattggataagctgttgatatccattccttgagtttatccatactcaacagtaaaaaatgaactcttggttcacacaataatatagacatatcttaaatccattttgctaagtgaaagaagctaggcctaaaagtctacatgttgggcgattctatttatatgacattctggaaaaggcaaaactatagggatgaagaacagatcagttgttgtcaggtttgagaaaaggagggaagtttgctacaaaggggctgcaaagggaataggctgatggagctgttctgtatggtactgtgtggtggatacatgacaatatccatttgcaaacacaagaactatacacatggccaggcgcggtggctcacacccgtaatcccagcactttgcggggccgaggcaggggaacacaaggtcaggagatcaagactgtcctggacaacatggtgaaaccctgtctctactgtctctaacatttgtaaacctgtctctaatttgtaatttgtaaaccctgtctctcatatttgtaaaactacaaaaattagcttggcatggtggtgtgcgcctgtagtcccagctactaggaggctgaggcaggagaatcacttgaaccaggaaggcggactgcattccagcctgggcaacagagaaagactctgtctcaaaaaaaaaaaaaaaaaaaaaaaactgtacactagacaaaggggcttttattgtatgcaaattttttaaaaatgaacagactgtcaagggaacccaggatggtatgcaaattgtggcaaatgaatctaattgtattataaatgtatgatatcaactcactgaaagggatggggaaaaaagaactgacaaagttggaaaacaatgttttgacttataactgtagataaggacacaaagaactgtatacaaaaactgcactctggttggtaaatttgtatctcacagaggcatggcttagcaattctaaaacgactttatatgtatatttgggttaaataagtcaatctattgtagataaggagagacaggttagtgtaagaattgaattgcagggcacccaactggtgtccagaaagctggaaaattggtcagctgttggggggagaaaatccacacatctggtgtcagaagtgtcgtgagtgaaaacagaccatcactccaccaagtggccagcatttaaattcatgccacacagagggaaccatgacagtctggtactgatgaccatgcagggttagccagggcagcagcaagcgcatcgaaaggacaatcccatagtcaagtaaggagaagtttgtatcatatgtgagaatgaagcttaaatggactgaacaaaatcttaaacattggcatgacagaattctcataactaagaggggatgaaaagttatgagatctaaattagaagttatgaagacatctgtcacccagtaagggtgggagggacaacgtatcagttgggggcaggtcctggaataaactaagccagctcttttttattttttgagatggagctttggtcttgtcacccaggctggagtgcaatggcatgatcttggctcactgcaacctccacctcccaagttcaagcaattctcctgccttcgcctcccaagtagctgagattacaggcgcctgctaccatggtaattttgtatttttagtagagatggggtttcaccatgttggttaggctggtctcgaacttctgacctcaggtgatccacctgctgtggcctcccaaagtgctggaattacaggcgtgagccaccacactgggccttaaggcagctcttgcttgtttacacaccaacaagctggatacctcaatcagccagtcacacttacatactctcccaaatcaagaatgattaatgcactgtagattgtctcatatttagatacgtaacttttctgtttatttcttgttttaagaaatttttgcaaatgaatcaatgaaaaattttttattgaatgttaatttttttctttccatttatggttttgttttctcacattagttgccaggaaatgttgactaattgtcttatctcatacactcgatgatgctaaatatgaggaaattttttcaagattaggataggatgaaaaagtagatataaagataaccaaggccaggtacagtggctcacgcctataatcccagctctgtgggaggccacggcaggcagatgacttcagcccaggggttcaagaccagcctgggcaacatggtaaaacccatctctacaaaaaatacaaaaattagctagacatggtggtgcctgcctgtagttccagctactcgggaggctgaggtgggaggatcacttgagcccaagaggttgaggctgcagtgagccatattcttgcctctgcattccagcctgggtgatagcaagactctgcctcaaacaaacaaagataactaacccattttgattccttaattagttaaataaaatgaattaattacccaaaccta

SEQ ID NO: 163 - DNA, 7836 bp, Homo sapiens
tttggacttgtgacctccgggacggtaagtcaataaacctacattatgtgaagccactaagcttgtggtgatttgttatggcagcaaaaggaagctttatggttcatctgtaccctgaaaatgcaggtttttggttttttttttttttcacttgttcaatgatgtacccccagtgtcaggcgctttgcaaacacacgatacatacgggttgatgtttggtcaagagaggaattaagaccaggcagacagcaggctgggatcagagagaccccatttctgtctgaaatgtctgcagagaacctggtgcctgcctcagccctagctctggggaaatgaaagccaggctggggttcaaatgagggcagtttcccttcctgtgggctgctgatggaacaaccccatgacgagaaggacccagcctccaagcggccacaccctgtgtgtctctttgtcctgccggcactgaggactcatccatctgcacagctggggcccctgggaggagacgccatgatccccaccttcacggctctgctctgcctcggtgagatttaaagagggggaggggagacccgagtcttggaggaaatttgcctcacagccaggccctggttctttaggagactcaaaaatctcagggtagccgggcgcggtggctcacgcctgtaatcccagcactttgggaggccgaggcgggcggatcacgaggtcaggagatcgagaccatcctggctaacacggtgaaaccctgtctctactaaaaatacaaaaaattagccgggggtggttgcaggcgcctgtggtcccagccactcgggaggctgaggcaggagaatggcgtgaacccgggaggcggagcttgcagtgagccaagatcgcaccaccgcactccagcctgggtgacagcgagactccgtctcaaaaaaaaaaaaaaaaaaaaatctcagggtaaagagaggacctgctcaggcttccggggcaaatccctcacagggaactctcttccagggctgagtctgggccccaggacccacatgcaggcaggtgagtctgtccccagctgtcccaggtccctcctcctcactgggacaaggggccacccatgggcagctgggggaggagacagcagttctgggtgactgatgaggatgacgggggggtcctggggctgagagctgggatctgagggctgaggaaggtcttgggatccagcctctgattttcttccagggcccctccccaaacccaccctctgggctgagccaggctctgtgatcagctgggggaactctgtgaccatctggtgtcaggggaccctggaggctcgggagtaccgtctggataaagaggaaagcccagcaccctgggacagacagaacccactggagcccaagaacaaggccagattctccatcccatccatgacagaggactatgcagggagataccgctgttactatcgcagccctgtaggctggtcacagcccagtgaccccctggagctggtgatgacaggtgagaggacactcaggggtcccagccccaggctctgccctcaggaagggggtcagctctcaggggcatctccctctcacagcccagccctggggatgatgtgggaggtgggagccccatttaacacggtgcctccttctctcctaggagcctacagtaaacccaccctttcagccctgccgagtcctcttgtgacctcaggaaagagcgtgaccctgctgtgtcagtcacggagcccaatggacacttttcttctgatcaaggagcgggcagcccatcccctactgcatctgagatcagagcacggagctcagcagcaccaggctgaattccccatgagtcctgtgacctcagtgcacggggggacctacaggtgcttcagctcacacggcttctcccactacctgctgtcacaccccagtgaccccctggagctcatagtctcaggtgaggctcctgaccctgtcctctctgagctcagtggctccgttcatgccctgctgccaggagagctctgggcagggatggagggagaggggctcagccagtgggggactcagccctcagaggggaggaggacaacaggggccctcccaggcatgcccatgctcttctccctcacctagggtccagaaggtgccaggtggacagagaaatggtccttgggaagctgcagggcagatatagggagaggttcaatttgatgtggagacccaagggcaaccccagactctcaccctcctcttgtccttctacccaggatccttggagggtcccaggccctcacccacaaggtccgtctcaacagctggtgagtctcagaggcctctgtccagagagtttccaaagcccgaggcctgtctcaagacatgctcagtggatctaagtcctcgttccaattctcagctgggcttgcttccacgggtgtgggagtcgggcagcgacttgggaggcaccacaggctcccaaggccctgaggctgggctggtgaggggtgagggggtcaaggctgaaggagatgttgcggggagaagccgagctgatgtggggagcagggcagccccagccctcacatccctgttctaacccagcaggccctgaggaccagcccctcatgcctacagggtcagtcccccacagtggtgagtgaggggctctgagtgggaggtgggcagggtctaggggagccaagggtgggttctgtcctaggttaaggctcctctggaggtggtgatgtggacaggcccctcccctgcatgggcctcagtttctccaagtgtaaaggagagaggcctgcgggtgggaaagttcctttcagctctgactcccagctgtgccctcctgggagaggaggcctcccagggaacctcccagacccgattccgcaggggcctgtccggtcccacctgcagcagagacggtgacctggggcaggggaggggagcagggcggtggttcaagacagtcaggctctttccctgcaactctggggcttggctctggtgcaggaacaagggctgcagctcagactcccgggtttccttcccagctctgccgcttcctggctggaggggtctggggcaggcgattcccctctctgagcctcagtttgtgcatctgtgaaatgggtggagagagggtggcaatctcaggttgcacaactgctgtgagggttggaggtaatgaaagaaagacccagcacacacagtaggtgcacacacagtaggtgtgcacatcaatgacatcatccccattcctgatgtcatcacgcccaaggtctgagaaggcactgggaggtactgatcggggtcttggtggtctccatcctgcttctctccctcctcctcttcctcctcctccaacactggcgtcagggaaaacacaggacattgggtaagtaggaaattgggggacccgtgggctgatggagggtgggctcagggcaccagccaaagggactccagataggagaggtcatcttagaaactctgctccagaaattcccagtgagaaaatctagaaagaagaaaatgaatgagggagtaatggaagtgctttattctttcggtttttctaaacttagaaagtatttaaaacatccttgcaagtgtattttcaggtttcctttcctcttgacttgcatgtgcaaggcaggtggttctaacgttcccagagctgagactctgtccatcttcccccagcccagagacaggctgatttccaacgtcctccaggggctgccgagccagagcccaaggacgggggcctacagaggaggtaattctgcccaaagacctcagactcccacccatcccaacagccacctcactgtccccttacactcccgtatcctcccccaggtccagcccagctgctgacgtccagggagaaaacttctgtgagtgagaggcagagaaggtgcacctggggtggagctgggggtcccaaaatttcaatagcaatgggggcaggagcacaggctaggattggtcagggactcagggagaagtggtctgaacccacattgtgggacctcggggacatcacagcccctccctgcgttgcagtggcactaatgggaacagggcagggaccagcaggaatgagaggtcccagggaaccttcccaggagatgaaccccttgctctaccccagcaggtgctgccgtgaagaacacacagcctgaggacggggtggaaatggacactcgggtgagaacccgcccctgtccccggcaccaaaggcctcctggtgccagatctaatcctgcaggacttctctgtcctccttcccccggctctcagcatcgtcacggtggacccctccttgtccagcacgctgcctcctgcctgctgggacctcactctctcctgctgtcctgggacctcatgggcctcctcccgggtccccttcctgctcctcatcctctgtttggccatctggttgttagagagctccccaggcctcaggaggatgacgaataaatgaaccactccagtcccctgggctccccttcattcattcatctagtgagtgttcccagggagctcactgtggatggggctccccatgggagctgcagacacagcagggagcaaagccgcccccgcctcctgagctcacctcgtggtgggagacaaaatgcaaataaatgcatcgtgtccaggagtgcaacgtgctgtaaggaacataaaccaggtaaagggcagagagtgtggggcagtggggccagtctgaatggaaagggagggctgtctgctcagctgtcatctgagaagcctggacggagagggccacgtgatcctctaatggacgagcccctgcaggcagaggaaacagccgtgcaaaggccccgaggcagcagcgagctcttgcaggaaggccgcgtgaggctgcagccaaatgggcaaggtcagagtgaggagcagagaccagaaccacagggagggagcggccagaccctccacggccttagggcatccctgagattccgtcaggaaagggatgtaatcggatcaccctgggaacagtggggaaaattgactccagggagtcaggaggattcaaggacaccccccaccactgtctctctccagcagagcccacacgatgaagacccccaggcagtgacgtatgccaaggtgaaacactccagacctaggagagaaatggcctctcctccctccccactgtctggggaattcctggacacaaaggacagacaggcagaagaggacagacagatggacactgaggtgagtcctttcctctccaggcccccaggcctcccccacccccaccacgttccttccctctcactctcccccgctgcaggctgctgcatctgaagccccccaggatgtgacctacgcccggctgcacagctttaccctcagacagaaggcaactgagcctcctccatcccaggaaggggcctctccagctgagcccagtgtctatgccactctggccatccactaatccaggggggacccagaccccacaagccatggagactcaggaccccagaaggcatggaagctgcctccagtagacatcactgaaccccagccagcccagacccctgacacagaccactagaagattccgggaacgttgggagtcacctgattctgcaaagataaataatatccctgcattatcaaaataaagtagcagacctctcaattcacaatgagttaactgataaaacaaaacagaagtcagacaatgttttaaattgaatgatcatgtaaatattacacatcaaaccaatgacatgggaaaatgggagcttctaatgaggacaaacaaaaaatagagaaaaattaataaagtcaaaatgtttattcttgaaaacattaatgatacatgaatcttggccacaatgagaaaaataaaaatgaaaaaagagcaggcatccatttccatacaggaacaaaataggaggcagcactacagaccctacacacagctttacagaggtgaaagaaaactgtcagcaattctatgctgacataacagaaaatgtagatgagatagatgaaatacgaaaaattacagtttacttaatgaacataaggataaatagaaaaactgaatcatcatacataaacatatataaaatgcattgatcctgtaatcaaaaatgttcccacaaagtaaatgccacttcagcaaggtttgttggtggttttttcaaactcttatgcactcatgaaacacacagacacacacacacacaaacttgcataaattttccctgagaatattttgtatatatttacacaaatacatttgatcagactaggaacaagttgataccaaaacctgaaaaggaaactacagaatgggaaagtcatagaagatctctcacagaaatataaatcccttaacaaatattaacaagtaagattcatgtctctataaaatagacagtatatcatgaccacactggttttttgttatcctttgattttgtttatgaaaagcaaggatagcttaattttcaaaaactcaatcaatgtaattcagtattttaacaaaaggaatgaaaaattatcatctcaatagacaaagcttttgtctgagcaccttttcatatagctgctgaccatttgtatgtcttcttttgagaaatgcctgttcagctactttgcccatgtttcaagtagtttttggtttcttgctgttgctttgttttagttccttacatatttttgcatattaaccctttatcaggtatacagcttgcaactattttctcccatttctgagttgtctcttcattctgtttgcagaagctgtttagaagccacaccttttgtctatttttgcttttgttgcttgtgttttcagggccatatccaaaaaaaccttgcccggaccaacgtcttgaagcttttctcccacccatttttgtatatgggataagggttcaatttcattcttcttcatatgaatatccccaggatgtgtcctatgcccagctgcacagcttaccctcaaacagaaaataatgaagccttcttcctcccaggaaaggggacgttcagctgagccgagtgtgtatactgctctggccatccactagcccagggaggacccagacctccacactccatggagactcagttctcctaggaccatttattcaaaaggactgccctctcttgttcttggaaactttgttgaggatcaattcaccataaatatgtgtgtttccttctttgctttcatccctgttgcactgatcactgtacctgtttctattccagttccatgatgtcttcctggctgtagctttgtaggatatttggggattccatagtgtgatatccccttcttccctttgctcaagattgttttggctatttggggtccttttgtagtcccattcaaattttaggattgtttttctatttctgtggaaaacgaccttggaattttgttaggaattgcattgagtctgcaggtatgaacttttttttaaagttccagggcacatgtacaggacctgcagctttgttacataggtaggcttgtgccatggtggtttgctgcacctatcaacccattacctagttattaagcccagcatgcattagctctttttcctgatgctctccctcccttcatcatccgccctcccactacaagccccagtgtgtgttgttcccctccctgtgtccatgtgttctcattgttatacgaacattttaacaatgttaattcttgcagaccatgaacataagctaccttcccatttatatgcgtcttgttcaatttcattcatcaatgttataaagattttagtgcaga

SEQ ID NO: 164 - DNA, 115598 bp, Homo sapiens
ccatgttacgctttgtctaattcccctcgttacagagtcatgtgctgctgctcccgtcgccgctgctgccgctgccgctgccgccgcccgtggtgccccggctcctccgccgcgcttcgaggtggcagccgcgggcggggccgcgggagcagggtccagggtgcagcgcgccttcgccgccccggcgcgtcccggtgcagccgccgcccgccgcgggtgatgccgccacctccggcctcagcataagccgtggcttggcggccgagctgcaccccaaggttggtgcgcacctctcccggcaggggccgggggctgcgagggaaggcgacgcgcaggtggagccgcgccgagccggagcgcgcaaccctggcgcaggcgccgcggcccgagctgcggttgcggccgggaactcattcggggacgtccgggggtcgggaggaggtggcggcgagcggagtgggctcccgtttgctgccgccagggcctgggagattgttccgctttctgcagtctgagcgtcggccgcttcggccccgggcggccggccctgcgggaggggagtgcggcttcctggctcctgaacccctcgcgcgcgctcccttctctcacctccctccgccctatcggaaaggcggggagagccggtttcggctctgctggttcctcccggaggtgggtgtttggtgtctggccttgctggcccggcgtccaaaggtgagccctttaacttctccagaatcgcctcccctccgcttccttcctgtgcagggtgggctgcgctgggagcccggcgggcgggggcggggaggtgaaggcccgcgccccgccccccgcgcctgtgggagggagctgggggcccgcaggtgcacccagccgtccgcgggccgtctccgggttgggtaccggtataatccgcttctagcttgtttggaggcgtgggctcttgggagcgggacttctgctcaaatcctgtccaggggcttgaaaaggaggagaattgggggtggttgccgggaggaccagcacctccagttactggagggttgataggggccttctcctttccgtcaccctttactagggggtatcccttgcagataaatgagattttttgatttcttaaaaagccagctgcagtgaagaagaactgctgcaggtcgaggggaagagaggtaggtccttgctggagagggagaggtgggctgtgaggttccaggagcacgcacttggggtgtgtgtggccgaaagtatggaggtagggttgtgggaaggaaacagccgagatgagagggagggcgcactcaggatgtaggcggagagatggggaataggtactggggagtcctagcggaatgtggggcccagctggagccgcttggcttatatttggctcctcgttgcctcgcagatttcctgctcttggatcttcaaaaatatttttttgttggacaaagaaaactctgaggacatattttggaagagctgatttctggaaactttccttggcagctttgatagtaaaattccgtacaggcagcgtttattgagcacctattacgtggtttgtaccggactttggaagagtctggacaggcagggaatccccgtttgcagtaatgatgagggctgtctaccttataaacaaataaggggcccctcccagtgccaagaatgagagtgatcagaccttcctcgccatagcatctgggacctctgcttcttacagacctgtgggaagaaccctgcaccatatcctgtaaatggggtcctcaggcagcatttatttttgcagtccaaaaatagtgaccaaacacctactgtcagctaggcgagagttggggttcttgcttcatctgtcttgacaccaactaactaaatccctgttaaaatccaagtgcaagatggggaggaatctgagatgaaaattaggtggttaaaacaggggtcacgaaaagttgatttggggtgtttggtctctgtaggttacttatggagccccccataaaatgattaggtaatctatggagccagggaaaaattccaaaatcttgaattggcacagtttatttatatatttgaacactatgttagatttgtctcgtttttattgagagtgtatgtgtgcgtgttgattaaaacctaacagattagaaggttggagaggaaactgtccttagatgacccagccttccattaccatgtggagtagcatatgatgcaacacttaaagtattgagccatattcatatcattttctccctgctgtgttttccagcatttaaaaaacatggtcaaaacttggccctttttttctcaaaatcgctaaagtttaatggaaagaaaaaagaaaaaaactaggccccttttcccttaatttttatattatgcagcatttttaaaaattaattttagaaaattctgatgtgtttgtcatgtccaaatagttaaattgttttggtagctatagtttggaaattagactcgattctgttctcagtactgtagacaaaatagctattaaagtcaaaagtttgtcaaaactttgtaatcatgattattatgttgttgaagtggtagcttgtaagagatttcagttatttttaattggagctggtgtttgacattctaagaaacaccagttaatatttgttgagtgccagcaggaagcagagaactggagtgggtgctgtgggatcttaacaaggcaggagaggattctcgtagtaatcacagagagcagataagacaggcacacatgaggatgccagcagaagcagacagttacagttgtctaagaatccagggtgtgtggaaccagataaaagtttatgaagtatgctgagggaggagtggaaatctgaattgacttttgacagtggtcagggatgtggaacagaatatacgactaataaaggagggtagagggaacctagttcgtgaaaaacttaaccacaagtcagtggtgttaatcatttgcctcaagaccagtggctctcagaagtaggcaattttgcttctcagcagacattgaggaatgtcggagacatttatggttatcatagcgaggtggcaggtgctgctgtcatctagtggctagaggacagggatgatacataagcatcctactgtgcacaggacatcaacccccttcctcctaaacaaagaatgatcctgtccaaaatggcgatagtgcctgcccttagatctcagaataggtcttgaagggaggtggttcttgacatgggaggagtaataacattgagcttaggaagctgatgtaggagacttgtgctcaggtctgatgtgattagggtctgggcaaatccttattgaaagaaaggggcagtttggagggagatcatagcagatgagcacagtatgatagtggagtaagttgggaatcattgaaatcagaattggcattttagaggggccctatccaatttatttattttagtaaattcttaccctttctaggtaacttttgtttaaccccaggaaccgtgaacttctcctgaagacaggttattacacctttggactgtttgttgtatttttacttgagctgaagactgtctccttgaatttttttttccaatgattttcttcttttggagctgcctactctctttgaatgcaccaagacaatatgatgtccccttacccccagttgactttgctaatgcaaactagtcccaattcttttcacagtcttttattgggatgtggtttctcgatgtcttctcagtttatcggcatctcacatggagaatctggaattgaatatgtaattgagatgtgatctggccaacagagagtacagtaagacagctgtttgctgagacctaagcataaatgtctacttactgcaccttaagcttacaactgcctatgattttcttaggcagtgccgagcacaaacttctttattagataatcatgttttggatagtcaaaacccccagatatttgctctgtgagctgctgcatcctgtatttcttgggcagatttttttggagaagttttttttgttgttgttgttccttctcaatgttatcctatttattttgatccagtcttctagcctttgacatttttgaatttatgtcttctaattatatcagagaggaatggaggatgactttgttgaaaactgtagtcagtactatgtaaaactcagtagtttgggggctctattggtcctatatgagagctgagatcactgagtgatggaggtgagttctagggctaattagcccttattttgggggcttctgagaaatttaaatgccaggccacatggcatttagctcttgaaatgtttgcacctggggtaccattttgaaattgttcaagtctgttgcaagcttctgaaatctgaattccttcctctgggtctttgtagttctgtttatgtatctggaagagagtttctaatgttttgtgcaaatctgaagcttgcagggttagagttgcttttgaaatttgtgagaagataggataactggcaaaaatcaactatggacttgtttcccactcaggctaagctttgttttcttttttgctaatatgcctcaaatatttagtgacagccttatatttagagaaggagagaggattgaggtttagaagcaaacctttttctcagagcttggctttaacttgccgttgatgtaagttcatacttaacttgaattttacagtcttcactacaaagacattaggaaattaccattcccagatgtcttctgaagctggcaggtaagaaatcccaggtaccttagtgccaagttctccaaatactctagatctatccagtgaactagatttaataaattacttgatttgggtggtagctgtctcacagtgttgaaggagagctagaggaaaatttcaaatctcatggccaaatgtgtgtcacctctttgtgatgagtgtccattgtgccccaatcctttgttagtgtgttggctgtccagatggtgcagtctacttggtttcccttctttaccagtccacgtgggcaacctctttatatcctctggagatgaaggatattccaatgaaaagaagggatgccttttgaatatttgaaatttcttgaggggaaaagtgttgctgtccttttatattgtcaaaggctgtgtcgaagttggagtcttagaattaaggatgcagttgtgtcactttgaatagaaagaatattatagctggaagggatcaacccttaaattttattttattttattttattttattttatttttttagacggagtctcgctctgtcgcccaggctggagtgcagtggcgcgatctcagctcactgcaagctccgcctcccgggttcacgccattctcctgcctcagcctcccgagtagctgggactacaggcacccgccactgcacacagctaattttttgtatttttagtagagatggggtttcaccatggtctcgatctcctgacctcatgatccgcccgcctcggcctcccaaagtgctgggattacaggcatgagccaccgcgcctggctacccttaaattttatagttgagcgtatccaggcacagggaggtgatgtgcttagcgtaagtttacacatgtagtgacagagtaggcattagaatctatctgccttaaagaccacaataaaggctaaggatcaggatttcttctctgcttagaggtgtgtaaacagtggggtccctcgggtcttatttacataattgatctaaaagaaggaacacacagtggaatttctaggtttgcagatgacagcttttctggattatgaaatgtctaaccactgggtatttgctccagggaaaccacactaggatgtattagtcatcagacgatttgcaggtgagtttcttgtgggcaaataggtggttgggtattaaggggaaattacagaattttcataggatggtgttttgttggataaactcagggaagggctctgaaaataccttcatgttgttgtcctgacttgctgttgcagaaaaacaaaaaccatgaaatgctaggcttcatcaaaaagattttggggctgggcatggtggctcaggcctgtaatcccagcagtttgggaggctgaggtgggcagatcacctaaggtcaggaattcgagaccagcctggccaacctggtgaaaccccgtctctactaaaaataaaaaaattagccagatgtggtggtggtgcctgtaatcccagctactcgggaagttgaggcaggagaatcacttgaactcaagaggcggagtttgcagtgagctgagatcgcgccattgcactccagcctgggcaacagagactgtctcaaaaaaaaaaaaaaaaaagattttggggaaaaaaatacaaaatatagtcttaattgagttttcactgtgttttttcccccaaattcgtgggcacctaaccttcagaaagacactagagctggaatgaccattgtaatgatacctacctagaatgtttggacattgctgctagaatgtaagcttcatgaggacagggtccttgctcatctgtttctttgataaaaatattaagatttctagcacctggaaagagtcatctgagaggagatggcatggaggcctatgaaaccacaaggatagggccataggcagccttgatagttcactttattctaataagcccaagcgtgctattttaattgcctccttgtcttcctgctccggtactctgtcagtgtggttaggatagggatttatctctcttgttctctactgattttctagtgccttgcacgtggcaggccctctattagtatttgtcacccagaggaatgaaagaagaggtataccttaaaactttacaagatataaattcaggatgaatgccaagaaatatggtttttctcaaccctggctggcatcagaatcagtctggggaatattttttaaatacatatattcagacccttccccatgcctattgaatcagaatctctggatatggagtttagttttgaaaacagccctccctgcctccaggtaattctaatgtgcagctcagctcagaaccaccatcttagtagttgtgcacgaaggctgggtactgactgaagacaccttcaaatgggtttgaaacatttgtggccagcaagcccatcattggttattaagacaaaagagaagctttaaggatatgtcagtcttcttggaaggtatagtgacccaaacagcacatggtccaccatggcccttggtgcctccatgagatagtgcatcctgggctggatggatgatgggaccaactcccagtccatccttgagcagtcatttccagagtgggtccctgatgacagtttcaccagcccatgaaaaaatgagaagagtgaagacaatgcaacaagcttttctgtttcaactttagtgctaagtttattcaattataagagtctggttttttgttttgtttttgttttgtttaatcttgggttgtccttcctactggaaggttggcttgttttttcattttatgaaaggatgatgatggttttttggtgtcatttctaggtccagttttaagctggcaattttgtgatagtctttcttttgacattttactggcctgtgaaatcaaaagtctgggaactaccactcctctgaggttttcaagatgtctgtgtctaccccttgacacctccttttggggaacgctcataaatatggtgttaggttccattacaagcattttttttttcttaaaacatttttttctttcctcttatgcttgctggtaatagttaggaacattgccagagaaagcttcacttccccaacaatgcataaatcccattgctacatcttagcatcgacagatagccagcactgcaacgagttctgcagaacaaggagaagaaaggatgtacaagaagacacctttttctctgatggtcattggccgccagaaagctgtgtctcaaaatctctcatgctatagagataggacagaactcttcagattgggtattagatgccgtcagtcaaaattctcttcactgattgcttacaacccaattttaagaaatactagaaaattaaaatgcttggaaaaatggtccccatggtgcttgcaatggcactctactgagtaggcttttaaaatcagagtattctcagatatggctgcttttttgttttcgtatttaacttagctggttaagaagtacttggacaatgtatggaacacctaaagttattaataataacagctattaggcacttaatgattgtccaaacctatgccctggaatttacatgcattctcatataatcctcaaaacaattctgagtgaaagatagacttattcccactctacggatgaggtcataaggctggaaaggttatgtcatttgcaacaacgtcacatagaagtggcggaggtggaatttgaaaccagactcattttataccagacttttttattttaaaccagactttttaatattttataatatatacctattctcttatctactgtaccctttctcatttctgcacatttctttgtatttattttataatacctagtagtatttctgttacatgaaaaagagaatcaggttttgaggtgtaaaggtacctgataactcctctggttcgtgctgcgtgtttgaagagtagagccatagcggcatcccggcatttaggcttccaggccaatgctcttgtcaccccaagttggtcttagaagtatgagcctgttggtaaaactacttgaatgaaaatttatcctggaattgagagggtaactttaaatcacttaattattctggtgttttctctagccctgttctcttttgtcacccatattgatgatagaatgccacttgtaaagtacatcttaagcaccctcctcctagttagatctcagccagaataactactgtacataaacaaatcatgtaaagatatacctaatatttgctaaggtgttatgtcttagctgaaaaaactgctgtaacaaatgtttgctgaataaatgccataaatatattcaatataaaaaaactatatcttcaaagtaaatgaatgaataaataaatatccatgtatctacatcatattcataggctgtttcattcgtgcctttattttttaaatacaagaaaattatacttcattatactcaagtataatctctttgctggagtgaatttattctgttcaagttttactttaactattgaattatttatcttaacatttagccagtaataaagtacaaattgggaactgggctgcagttttatacatcttgcacaaaacacacccttcctacaaacacacacactcagagacagagagagatgcacttgttctttaacttagctctcttaagatatttttcaattccaaaatagtttctctttcacctgttctaaattcttttccttataacttatttatacctgctaagttctgtaccaagcagaaattagatctgtaatttctgtgctaatcagagttggatactagcagtagcctgggggtcttgagcaaatagtgtgcctcagagatgatttgtggcagcaggcactcgccctcagggtggggtcatcaggagtgggaggcccatcagaagtgggcctgttgagcagtgcattgttgccgcgtgggaatgtgggccggtgttgccaggtcttctgatttttcactgtaagccagaaatctggattattgtgtaaaatctgattttaaaggttggctaattcaacattttagaacttcctgtaaaccaaacaaaatagctttgtgggctggaaaccgcctctttaggcccttagagatagccctttagtggccagataaatggaagcatagggtttgaataaaaagcacaatacacttttttttttttttttttttgagatggagtctcactctgtggcccaggctggagtgcagtgctgtgatcttggctcactgcaacctccgcctcccgggttcaagcgattctcctacctcagcctcctgagtagctgggattacaggtacgcaccaccacacccagctaatctttgtatttttaggagagagggggtttcgccatgttggccaggctggtctcgaactcctaacctcatgtaatctgcctgcctcagcctcccaaagtgctgggattacaggcatgagccaccacgcctggcccacaatacacttttaaacattaatttaaattgacatgaattgaaacttgatttcatccttttctttcccaaccccagacacaaagcagagcaaagcaacccgcaagccccgtactttaatgataacaatttctgacctttaaatgtggtgtattacatctggagtggttgcatttgaacaggttgtctggcctgaggaggaataggtttagggagaaataggtagagtatgaatataaaaggggagaggaccggtgggacacacacagagagagaaggaagggtaagagccacttggagttgagtaaagagatcatctaccccaggagatacgggaagatttgttcatatcttaaaattgatttggggtaaatggggaagaaagagaaagaaagaaaaaatgtcaatgtttagaaatagtgcagaatctatgttggcagggggcaaagagtgctattattttgcaattcctagtgtatcatgttaatgtgtacggtggcttctacaaaaggggaattggaatgaaaaggaaggaaaagagtttatgtcagaaagaagactagggagtgagataaagaagaggggtccagagaacagctgatagcaaaaagtaaaccaagaatgctggaaaatgtttgcataggggaaagctggctatgttagagtacaaagcatcatttttttcccccatccaaactatgacattgagcgggtatacacagcagtccctaggaaaaagacggtttggaacaccagcttgttttgcttttgaagggccagcctccagggtccctttgtgtgaagcagtgtcagcagggctgcgtctgcgctgtcagggcacactgccgggaggatattgtctactgggttttagcccctctccaccatctgggtatcttggtgcaggacaggacctcagacctttactgtgaccccaatagtgctcctgtctttagttttatttgcttttctggggaaaatctaacatcgtttgtgtaatttgttgtacatacaccctctttgaaagagaagagagtaataatttgaacagatttctgctactagcagaatcctagtctgagaggatttttaaaagcattttgctcttaatcatcccaagtatatagtaccttgttcctggaatttcagcattttctgtggggaggggaacaacgtcttttcatcatctgcaggttttattccagtcctggggctatcatccctgtgtgatctgaactatgtctttctagactggaataactttaaatttctaatactttggttgctttttagaataaattcattttaaaatgtccccttctatttgttactttagtgcagtaaggatctttatggatttcttttcccccttatggaaaccatttgtagtattgagagaatgggttcaggttttcttgcactgttgggaagaagaaaaattcttcaaattccactgctcggccttctagggactctactctacagatggaagtcctggaagatcctatcaggaagtgaaacttgtaaataatgtttgtgctcgtttggggcattatgcgttaacaagttgtacaagaagtcttctttaaccttcttataaaatacacttaaaaaagaatccagtcctagtgacgaatctggaaataagactaggaaacacttcaccatgtgccaggcactgtttgcagcactttacatatattagctcatttacttctgacaacagccccattttgtagcagaggaaaccaaggctggcttctctagtctggctgctcctcccaatcaccatgagcagccaaggtcattacaggaagtggcagaactgtgatttgaacccaagctgccatggcttcaggatctgtgctttttaggactccttcattgccccttgaactctctcacaacaacgacgaacataaatttgctttagaaacttcttttgccttccacattacctcagtcttaaagtcagcatcagagtttggttgaaaaaagaaataaaattatattccttccctgatactgcctccccaaaccaaatgaacaaatgaaatcatggagacagtttccatctaggaacagaaacctgactaaaggatcttcctggaacaccgtactaaaacgctggactgatcattacaaaggctgtagttggagccttgttgctgtgacaacccgcatccttggcaccagacttgtttttaacagcacaaaacccatcttgttttacctttacctttacaactggtagatttggtgagcttctgagagcactttttaaattgctttttgcaacctatttggaggcagtgggaaggacctaggatttggagcttaaaagacttgagttctaatcccagcactctcttttgtggactcgtgtgaccttgggtttcatctcctgtaaatgggggaggggacagtaacggcactaggattggtttggtgaggataagaagctattatatatgacagtattttattcacaatagccatgtgtgtcaggcagtgagctgaccagcaagtcctttgtgagtcttggaatgcattttccatgggtgggtggtgaggtaggtggttggggaaggtttgtgttgatctgaaccccttttctttcctgttctctccttacctgtattccagtgtgaatgatagtgtgggtgtcaactcagtttttggcccaaattccttttccttggttttcccccctcctactttgggctctcttccagtttgcctacaaagtgctatttgttgcaagggtgaagcaggcaattctctgggcagcgacactgtggctgcaggcagttgctgtagttcaaagcaaacagccaagctagagtaggagggacactgacggggtttgttcattagaattttgaacattaatttttgaaggaaagaaaggggagtacaaatagaataggaatagaaatattgtgaaattttctttataacagaacaaaattgggtcaggagaaaggactttaagaaatcacttaacatttatcattactttgaaagcaaatgccttttttgagtaaaagcaaatgctttttgagcatttactttgtctgcagtgcactctagtggggtgggaaacgaaagttagcactaaatattaacaacggctatcatgttagtgcatttcaggtggtccacagtgggccacttttctgttctattcttatatcagccatgaaggttggtgtcattggtgttccatttcaaagattacaaaactgaggctcagtgtgtttaaataacccactcaaggatacagtgctaataactagcagggagagctaaacttcgacctaggtctctttctcatccacaatatgaaagatgagtaagatatgcccctgctttgaagataagacctgcatgtaaacagtttagtataattcagcacagtttgcagtatatgttgtaattcttgtgagagctacattttttggacatttgctcagaaggagagactgattttgactggaaagatcaggggaggtctcacaaggaaaaataccttgaatagggccttgaaggatgacaaagatggtgacaggtagagaattgatgggagagctgagggaacgttggagcagcaaagcatggagttgtagaagtacagaatgtgtttgggaaatgctgctgggatggagtgagggatggaggaggaaaggaagccagagaagtagtttgggacagattacagagggcctagagtgtcctgctgaggaatttagacttcacttggttgcctttgaataaaggttattccattgaaggttcttgagaagggaaataattttgccttgatctctgccttcagcaattctggtggtagcatgggctttcgccagcactaggctgcatctaaggatcacttgggagtttcctaaatgtgcagattccaggagcacccctccacccccatgatttcagtggttcacatcttgggtagggcctgggaaagtgtgttttgaaggctctgcaggtggttctgagggcagcctggtgagggaagggttctagagggcattggggcattctagagaaaggtctgagctgaagctaattttgagtttgtccctgtatggatgattttttaaaccatgggagggggccagtcatcaaactttgtggaagttctgtctgtgtaggttctatggtttgctttttgtcctctgtaagtattaaacagtaatctctcagagcattgtcatttggctgaagtttttcacatgtatttcctgttcaaatctagaatgtgggatggctctaatccttatgcccctgtgctagatttctccttttttgttgctgtttcttttagaaggcagaggaatatatgggattttattgtgggctgtacctgtcttcaatgacaatctcttggagagcatgagctctgtagtttactgcctgggtttttactctgcctttctagccatgggaacatgggaaagttacttaacttactataaaatgaagatacaataatatttacctcctagggttagttgtgaggatggtttatataaaatgcttagaacagttcctggcacatagttaacactcacgtgttagctgctgttgctgttattattgtcattaattctgcagatacctaaaggtattccttgcctgcattgctcgcgtattgagggcttcaccttaaaaaataactgtacaaattatgattgagagtagtaagggtgacatattagaaagttttaattattcagtgaccctctttcctttcagagccttttattttctagaaacatatgctttcctcccatgaacaagcctgctaggacatacttaaaacccatatctggtcaagaatctcttcctgcatattggctacagagctaatagtgcagttcttcagtctcttaggagctacatgaaatgatgctcacttttacatttcctaggacccagcctgaatataggtcatttttttttcaaatgtttcagagctctcttactctcatttgttagttctaaatcaactgctaacatttaaaatacaatttttgctgggaggacagatagttctaccaagggataagctatttctcaacattaaagaaattagaaattataatttatgcttaaaaaaataatgttagttcaagttttagcttgcttctctctgccttctctactgttctttgtcctgccatgtgtttgcaaaccattctcatgaccttctgcctgtgcggcatatttgtagtggggccagattatacatacgccactgacattttcatctgacctcctaaactcagcctttgagccccttcttttctttgggttttcctaacgaagtcttgttgaaaggaatattatttcccatggaactttactgatagtgtatggaataatacgatcatgctctgtgaagttcagacctgaagtcttaacattttaaacatgtatctatttgctattgcttacttagttcagtcttggcattttaggtttagaggtggttactacccattggacatccatagccactccctgcaaattaaaggggacacaaaaatgaaactgaacttctgtttttcttcacctctctgctaatttaactaagtcaattggctcgccctcatttgccctcttcacacctcccaaattaatgttatgtgcaaatttgattaaaacagcgtgagtaatttccaagttacttttgaatacggattgaattccgttccttgtggctttttcttcatcatactagtagatgtagccagtgtttttgtttctagcctgcttaacttgtgtggttcttggaacaacataagttttggttgatttaggatcctgatttcacaggatactgtatcaactgctttaccaagatcaaagtacatgggttcactgcattcctttcagttgctaattcagttgtgctgtagccaggcaatcctggagccttgaaatccaggattctggtcaaggtgaggaagcagcccttcctcctggccttttcattctgcaaataccttttctttccttcttaatatttatttattcagcaatgtggcccaggctctgcatccctgacttcctaaagctttcagcctagtgcccctagacaagtggttacattcttgctacaaactggaaagtctctgagcccctcaccccactcctccccacttcttttcttctgctgtatttatggcactgtacctcatgaactttcacacaagggaaagcaaactcaatccaattgggtcttatgggtaagaaaatgtgttggttaaagtagattctggtcagccaggctatcgaagttttagtatttactagcagtgtgactttgggcaaattacttaacatctccatgtccatgtctcttttctcatctgtaatatgaagataacaataactcctacctcatagggttgttgtcaggaatcattgaagtgttaatacatgtaaagtgcttggcatttattaaactagggttagttaaaaaattgatgaataagctattaaaagttcataataaagtttctggagttttcaggtactccgtttctctttcgtgctatttgccttggctattccactacaggcaaaggaaaggagatgaaatttaaagtatctaattttgtaaccttaaattattcatgaattgtttttcttcgtgtagactccattataatgtataatggagaattgtattcaagatatgatgtgtgtgacttattccttatgaactctgaaagtcatttttaagaacacttcttaataatgaacattatatttatttgactttttaggatccaacccttttacattgttgggctttttaatatgttatttaaaaaacaagattgcccaggccaggcgtggtggctcacgcctgtaatcccagcactttgggagaccgaggtgggtggatcatttgagtccaggagtttgagaccagcctgggcaacatggcgaaacccctgtcccttaaaaaaaaaaaaaaggggggaaaaaagaaaaattagctggatgtggcgagctcctgtagtcccagctactggggaggctaaggtgggaggattggttgagcctgagagaacaaggctacagtgagctgagactgtgccactgcactccagcctgggaaacagagtgagactctgtctcaaaaataaaaataagataaataagattgcccaaagagaattaaaacaatgtttcaaataaggaagcagatactaccacagaagattaacagacaaaacatgctttccaaagaagaatgaattataggacagtatttcatctatgtaatacacatcaaaatcaacagtcattaaataatccaaggctattcattcctagcagtctgtgctgggagcattttgaacagtcttttatacaggtatttgcatttagtcagaattttgggggatcttacccttctttcacagtattatgcctagtaaatcccagtacatcaaccatcatgtcctactttacatgcatttttttgcatactaattgaagaatgagagaggaagcttggaaaaaatgtattaagattttgtttatcacagtttgatcagtggatcagtcttattattttataaaataatatccagctgcagctcaagtgcatattttacctaatttatatctacttatattcctatggcttaaagtcagttgacctattacaaaatacatgtttatcctttacactttaccaaaatctggcgaggtgatgagggtgtatgatgcacttgagagagagcattacaagttatctttttaaagtgggattttttttctgagcaaaagatatgtagtgcagaataatatatccacagccaaaatgcacccactcatttctattcaattaaaagaaggaagaacagacccagggtgagttttcgttccattacctaaggctttgagaatatcacttaacatctgtgagccctgctgctgcttctgtaacacattaataatgacacctccctgcgaaggtagttctgagaattcattgaggcagggcctgtgagggtttgtcctatgtaatgttagtaattttgtgcaaggtgtgtgggttcattgtgtgtgtttggaagctgaggaaattggagcactgagcttagagagataccagctcaggcctgtagccaccctggccctacctgcctggtggttggatcttctaagtcatgctgtggggtgctttaagtagtgctttccttcttgctttctcaaaatcaggaaactatcttacaggcatatttttttttaaacatgatttgcgaccccttgctgcattttgtcatgtgaaatgacacttactctggttctttaaagatggctaataatcctctatgggtaaatgccaatcaggccagccagttggctctgcgaaaggcttccttgaaagccatggttcaggttttgcagagaccaggaagtgaatgtgagtgccagagacctccttcccagaaaatcctgttgcatgtgctaccccggaggtgaagacaaggtagggacactgctgtgaaggctgatagtgcagagggtcatctctttggcaaccagacagcttgtcattttttattttcttgtttgtaaaatccatgtgtaataatcaccaggactcctgatattcacacagagaattgcttgtggcaaacatttttaaccgccaaactaagatctttcttaagatgaagaaagataagcagcattgttttttagagatgagtttatcatctcctcctccacacccattagtcctcagaaaagctatttcttgaaactgaatttggagcttctaaaatggctttcacagtgttggtctcttcatctggggattatggtacttagggagtggagactttcaaagtgaaccttccacatttttccaaaatcttttgtggcataatttgtgcctacctgagagcgcattttttctttttatgaggttgtgattttaatatatatacatacacgtgcacacacacacgtgcgcatgcacacacacacacaaaagcataacagcggctatgagaaagaaacacttctgcatgaaacacagaaggagcgggcgaatagctgaccaggggaaagtatgagatggtgttcaggcctcatggtagttaggattaggaaatgtcaggggctgtgttgtattctccaaactgtaaactttgggagtcgtacagagtgaatgttaataaatatttttgataaggaggagggtttgggtttatagggagcctaagaaagagaaatgtggctgcccttcccccacagctggccactgctctggaggggagagtattagacatttgggtgtggacatagcagcataggcgaataccattgttagtctcccaccaaatgctcttctgtattttgttacctattaaaccatacaaactctcctatatatcattaaattatcactcagtacagtacttggacaaaataggaatagtctactgttaactgtttttagattaatgactttgaatttttcctaagagagattttaagaagttagatagtctaatcgcatgagtcccaaatataaaaaacaaaggctctgcaggtttaagttttcctttgccttttcttaagaatttaaatatttttcttcagaggttttccttgggctcttagataatgagtaacaaaaatgaaggagggataccaaaagatatttcaaaacataattgtgtccttaaaaacatggtaataattgacagggtttttaaaatgagagaagtttctagctaaatgccctgcttcacatccccactccccacactgagtactttgtggaaaatatgtggtagctgtttgggaagaagtattaagtttgtgaaaagacatgaagagttgccaggaccacggtaagcaaaggattgagagaaggaaaaaggtgaacagagctagaccctaaaaggatgctaagatcccttgagaagtcttttagtaagaagccctccttagactgcgagtgcctagtggacaggaatgcatctcactggtccttgcagtcttcttccccgcccctgcctttgtacttgaaggccatggtcatctgggtgcactacaattcaagtctgtgaggtgaggagaaaagggtgggtgaggtgtagttcatcgtctggaggcctcagtattgtcaagaccacccccccccttttttttgtgagtgcacaagactcttaatcaccttttcatttggttgcgtcaggagcctcatagcagcatgctactgacaggtgattgtgaactaagtgttatagcagaaggaaacagaaaatgagagaatgtcaacttgaagccatgtgtgtttttgtgaacatcatttgccactttcttaaagagccccagttagagaaaaaataatgcaggaatcgaattttagtcagcttgttaggttctgaactggacagactttgtaccttggcatatgagtagccattctagaaccttttgaacttttgccaccaagtaattctggaaaggctgacagccagcagtaggtaatggaaaaagccagtatcctctgcccgagaaattaaggtgtgtattattcaggtggttaaagaaactgcctaccacaacagcaatagctggtaagtagcaggatcattcagagatgaagggatggatcacaggatggttgctgtgctggactttctccctagaattcatgatcattggccaggagtggtggtttacgcctgtaatcccagcactttgggaggctgaggcgggtggatcatgaggtcaggagatcgagatcatcctggccaacattgtgaaacctcatctgtactaaaaatacaaaaaaattagctgggcatggtggcgtgtgcctgtagtttaagcttctcgggaggctgaggcaggagaatcgtttgaacccgagaggcggaggttgcagtgagccgagatcacgccactgcactccagcctgggcgacagagcgagactctgtctcagaaaaaaaaaaaaaaaaaagaatttgtgatcattgtaggaattcgcagtgtaggggaaatggtacagattttataatcaggaaagacctgtattcagttctccatttgaccactttctgccagagccatgggaacagttttttaatttctctgaccctgtttcctcacttgggaatatgacttttgcagatctgttggaaaatattaaggccaagagggatttaaaatgagatgttgtctagcactgagtaggagcttaatatctatccgttcctttctgcttcagtcaaaactgagcttcatatgtagaatgattattgtttgtattacattctccattttgagtatggaaccatgaatgccaacagcttgataataaaaggagccgtttgtcaagagacagtcctgtaagcgctttttaacctggtagactgtgcatgtaagggcaggcaggttacaaatgcgaatccccatagccagcacactctacatacagcagattcttaagccatctgtgtactctttttaacactgtactgaagtccacttaagtcagagttcaacaaaatgaatgaatgtaatcccaggactatggaacttctctgtgattacatagcacagagaactacggaatcattttctggaagaatgcaccatgcgattatgctccatgtggaattggtatatataaatgttggtagactgtgaggatgaggttgacaggttgatctgagtagagaccctaggaggaaccgaggatactatgtagttttgttgttgttactgttttgcagttcctggctgctctgtgttggcagctgtgtgcacgctttctcttttgagccagcgaggcacaagacaagtaatttcccatcttgaatctctcacagctgctgagctgtagtggatatactgggatgtggctatgaactttaaaaatttgcataaatccagcccctactcccctgcaaaggctcagtcttgtctttacaccttccccgaggtaattattttctggggggtaggggtgggggttgggagggtgaagaaaggaagaaaaagaaggccgatcacactgggcaccggcggaggaagcgtggagtccattgatctaggtacttgtggggaggggagaacccgagcagcagctgcaaacggaagggctgtgagcgagcgggcgggcgggtggctggcagcgaggccaccagcagggggggcccgggccgaggccgcgccacctcggcaccacgcgggcagccggtgcggcggggtcgccacggccaggggagcgctgggtgcccaccatggcagttatgcaagcggtgaccccctggtcttgcctccccgccgccctgcactccttcctccccgctgccgacacttggatctctctagctctttctctcccctgtgttttcaaacaggaagtgcacggctgtctataacgtgctgccgggtctcaggatggaggagtgaagtctcctgtcgccgtggttccagcctccggagctcgcccaagccgcgtccccagagagcgccctgagagaacagggtggccgcttggtccaggtgcgcggggtcgggtctgggtccagggagcgggtcgggaagtctgcggcacggagcactgctagtgtcggatctgcatctccagctctgtgctgcagcttcacttgcccgccccccaccactggcttctcacccggggtctctgccaaactctggctgctgccgccctgggttcgggccggcggaaggccctgggcgtgcgctgcggagccgcctgcgaggactccactagggcgctttccaggctggactgccccgggctgcgctggagctgccagtgctcggggagtcttcctggagtccccagctgccctctccaccctctcctccagctgctgctgcctgaagcagcagctctttgttcctcccttactggtctggggtcatacacataaatgtcctgggaggcagggtggtgggagggtaaggggttgggacgtagggaagaggaagaagatgagttgtgggtgaagtgtaaggtggacaggagaaaagaatcttagtgtccatgctcagaaatcagctcttcagctgctgaaacagaggaccccggttccttggtttctgttttgggaaagccaggccatgccaaacagagggaattaatgatgcaggcacacaccggaaaggtagggaccaggaatgaggcacagcagcgagttctgagatgtttagtctggtgtctggcttgttaactccactgtggtttctgagccaggcctcctcgctgagacagaaggtactttaacatatgagccaggcatctttattaattccatttgtcatcaaagtaaaattgagagtgacttttctcaaattcaccaggtagattatactttcacttccacatcgtgttccatctcaaatgttcataggagaataaaacactagggttggttttatgctacagacgttttgcatctttatttccctggcaggtccaatctttctccagaataactcagattgacttctccccccagtgaaagcctagccttgttttaccgcctgtttatctacctggtgaaactctagtcttggggaggacactaaggggagtgggatggctgagaataatcagtttgatgggatcattatatggcctcaaattaaatgtttgagccctgttaaagccagtagcatcttcttaatttttatttccgaggaagggatgtgagcatatgactagaggggaggaaagtgagactctgccaaagaagatctctccctgtagcacagaggaaaagtgaatctgtgtagcacagtatcacatacactgcgcgctttcactttatcgggtagccaagccatctaaggagtcagggttaggtgtagaatttacattcatgacgtgggatgctgactatagcattctgatgctgaaaattttatcataaaacatatttactacataattaagtttgctttgaaaggaaaatttaccagggtggtacaaatttaccagcttgagtacaaaacatgtaatcaataagtacatggcattaagtagccaaaatgcactatgaaaactgaacaattaaacttatccttcctagatagacatgaacttcgtaagtttgaatttaattgtgagatggctgtgtttatgcctcttcttgccaaatacgtcatgaaaagtgagaaagtaatcgagagagattctttttattttgagacggtttttcattctgtcacccaggctggagtgcagtgacgtgatctcagctcactgcaatctctgccgcctgggttcaagcgattctcctgcctcagcctcctgagtagctgagattacaggtgcacgccaccacacccagcgaatttttgtatttttagtagagacagggtttcaccatgttggccaggctggtctcgaactcctaacctcaagtgatctgcccacctcagccttccaaaatactgggaggccaccacactcagccagtcaagagagattcttgaaagacctgtacaaccatagtgttttgcagctacttttttttttttatttttgagacggaggagttttgctcttgttgccctggctggagtgcaatggtgcgatcttggcttaccacaacctccgtctcccgggttcaagcgactcttctgccacagcctcccgagtagctgggattacaggcacgcaccacctcgctcagctaattttgtatttttagtattgatggggtttatccatgttggtcagactggtctagaactcctcaccccatgatccacccgcctcggcctcccaaagtgctgggattacaggagtgagccactgcacccagccactgcctctacttttatacctatgtgtgttccttgccccccagtttattaatttatttggggactttctttagcatctgtcactctgctctaagatacagtagaacagcttttgtgagcctccaaatctcccatttaagaacagagtctccttctattctagtgatatttaaactcagaaatcataactggcctttagattgtcatgttctgtttacacagtgtatatgatgtatttttttttttttttttactcctttcaacagagctaaactcttcttgctcctttcaatgatgtagtgaagtaggattcattttctccagtttatggagagaggaaacaggctgatgagatgtaacttgtcagtggtcgtattagtaaatggagttgttgggacctgaacaaggtcttctgatgtaatccgtggttcttttgtagtctggaaagccgctgcctaaggaagaggtggcagtgctgattcaggtggtcctttgccattccaaaagaaagctggattgccttaccaaatctccaggtttttcgttatacctcttcactcaggctctgcccagaactcaaggtttgttttcatttttaaagcagttttttttttcatatttgaaatttacacttcctgtgtgtctgtgactagatttagctgtgtttgcaccagtgtgatttgtattctgccaaaattctagtagtatattttaatttacagataccttttgtcaggttttagtgagcaagtatctttccaagggatcagattaccatattttaattttttagaattaaaaaacctcttctggcttactcctagggcagtttatatcccagaaaattaattaattagtaaatgatatatatgactctccactccccactactgctgccactgtgcgcatcccctactctttcattccagctcacagtaatccactgagaggctcacattacagaacaacgtgagcaaacccatgtaactttaaattatagattaaatatttttgtaacattccttagatgcaagtaagtttatttccttatctttgtagcgcttaaagttgaggctctctttagttacagttttaatgttgcaccattaactaaactgtaaaattatggtttaatttgttatactgcaaattaaaatttggagtacaattttcataagtgttggataaaatatttgtcttctcttcaataattggaatatttgtagtggcctataacttcccctctgtaaaactgtggtcaaaaccctcagggagaggagaaggtaaaggaggagcaaaagagaggaaatgagagctcattgttttgtaagggaggaatgaaatgatacatgtatggttccttaatacgcagtgcactgccttttctgtctgtcggtgagttgcagtggcttgtgaaccagccgtgcatctcttccaacagaaaggctaaaaatgaaagggtaactagctttgatgttaaatgccaaggaaaagttaatggccaagaggggactaggagtggagataaatgcaagttaagatttcattttttcaaaactttttttcccttcacgtatattataaagtaaaaaatgccttcttagtcaaattgtaaactgtaatgcagtggctcctgacaccaaaatcaggaagcttttatttaatattaaaagatttcaacgatcttaactggttcactgttttacttcgtatctcttataattgcagatgtttcatgagagttatttaatatcagccaagtatatattgcaaataatgacttcagcatcttcctgtatttgtaaaatagcactgcatgtatatatgaggtagggattcagcctacagacctcttgcagtaccctgaagtctacaggttgggaattgaggccaaagcaaaacaactgctccagactgaaaatgctgaaatggtgatgaaaaatgcataatatgttagccatcagattataaagattcccaggtggaatttttcctctttgttgtacattaaaaggatgatgtgttaagccctgattttggatctggtcatgtttccgggctaatcgtttttcatggtcagctttgagatctttgcagttagtcatggataactggatttctcttaagagcattttccctacaatacttctgcgaatatgccttccctgtttttgtagagtcaggactgtgaggccagtttcagaatcatgatggtcatagccactaccaccaccaccaccagccctatattcatttcccagaagctaaaagaggcttcccaatcttaacctttacaatttgtggtaagtttaaggaaagggagataggatttatccctgttctgcagtgggaaaaactgatgtgtgggttcatattgaattagtctctctgatttctgtgtgtgttgtattgacatgaatgtaagtcattctgcttgagataggttgagcagggcatggaaatctaatagggttatttcatgaagttcctttatttgttaaaagaaattacttcctatctattgaacaccatatttttcaggcattgacaaatagacactgattatctctaatcctcctggtgttatgcagagtgggtaataaccctgtttgtttttttggttttttggggtttttttttgagactgagtctcgccttgtcacccaggctggagtgcagtggcgcgatctcggctcactgcaagctctgcctcccaggttcatgccattctcctgcctcagcctcccgagtagctgggattacaggcgcccaccaccacgctggctaattttttgtatttttagtagagacggggtttcaccgtgttagccaggatgatctcgatctcctgacttcttgatctgcccgcctctgcctcccaaagtgctgggattacacgcatgagccaccgtacctggccaataaccctgttttatgtgaagaaactgaggcaggcagagactccaagtcacacagacaagctaaggcctggacttggatccaggtttgtgcagtctccaacactaaaacatttccctcactgtatatcctgctttccttgttcttgaactagactatgtaaagaaatgatcatggtttgtttagtcttacctaccctttcagcaaaagttaagttaaaactgtaaacaatatggagacagtacaaatagggacatgaaagggtcaacatttttatgaatatttttggcttccatgtagtatgtattaatttttttctaagcaacctaggcatatggaatttattggccttcatgagaatttcttgaggcgatattgaccacaaacaatattgctggatcataggatatatgcgtactaggaactgcataattttactgggaactgcacagatagttgccaactttatatctccaccaatactgcataatgccttttttttttttttaaacaaatttcctgattgctgccaacctgataaatgttgattatacctaatcaattataattatacctaaccaaaattaatggtttaattttgcctttttctgattgctagtgaggctgaacatgtcttcatttacttaatttaatttcccttttccatgaattgtctttttatgtctttagcctgccctttattttctgttgggtctcttgcctttttcttgcaagaacttcttgagagaatttttgtaatgtttcttgtgtattctagaaattaattcctctttgtctttagacattgtaactttcttctagtgtgtcactttcctaataactttgtctatggtgcctttcagtaatagcaacaataaaatctttagttttaatgtacttgtctcatcactttatattattattatggtctgtgcattttgagtcatttaagaaatcctcccctattctgggctcacaatgttgtctctcctcattttcttttattaacttcaaaggttactcttattatttgggtttttaaactctttgtaatttgagatacgaagtattaacccaatttttatttttaaaaatctggtcatattgtgagccagttttcccagcactatttgccaactagtacattctttctccacagagttttggtgctacccctaggatgtcagtgcatatatgtagatgtatctttctgagatctctatttggttccagttgacttaattgtatgttcttgggcctttgatacactgttttatttatttatttttcaacttttattttaagtttaggggtacaagtgtatactacaaaggtaaactcgtgtcatgggggtttgttatacagattattttatcacccaggtattaagcctagtacccattagttatttttcctgatcctcttccttctccacttttcaaaaggccccactgtgtgttattttcctctatgtgtccatgtgttctcatcatttagctcccacttataagtgagaacatgtggtattcggttttctgttcctgtgttagtttgcaaaggataatggcctcccactccatgcaagtccctgcaaagcacatgatcttgttcttttctatgaatttttatgttcttttttatcaaggaatactactccttggtgtatatgtaccccatttcctttatccagcctgtcattgatggacatttaggttgactccatttctttactattggatacactgttttaattgttgcatgtacctttatataacatgattttattagcatgacttcttgttacatgtacatttatataacttgaccttattgttatgattgatacattaatataaattttaaagttcaagactttaagattattttgaggcagattccttgcccttatttgtatgtgttaactttttgcagctacacattttctaaaaacacatttctaaaagacacatttttctagaaatgtgtcgacctatctaggaatattgtttaatttccttacttggtaacataattttaatattgctgacgttacattttcttctgtttttttgtgtttttttttttgtcttttcttttcttcttttgttagcagttatggctccctttcatacttggtcatctgtgtagggcagtggtgtgtcactgcaaaggcttgtcctcctctgttgctctgtatgtgcttgtagagctatgaggtacattcctggtacggcttttgaatgaatgttttatgaggtgtgatgcttactgactgcatgggtgaatactcttgaaagtctcttaattacagatgtctctttattattgggacaactttgtcagtttcagcttgattttctccaagtttactttgctctagtcttctcagtttagtgggtcttattcttccccgtctgcaatttatgtcacactgaatgctaggtcactttatttggtaagtgggtgtttgtgtgcctctgcagagtacaatgtattttccccttgtctttctttttctttttttttttttgagacgagagtcttgctgtgttgcccaggctggagtgcaatggcacaatctcggctcactgcagcctctgcctcctgggttcaagtgattctcctgtctcagcctcctgagtggctgggattacaggtgcacattgccacatctggctaattttttgtattttagtagagatggggtttcaccatgttgcgcaggctggtctcaaactcctgagctcaggcaatccacctgcctcggcctcccaaagtgctaggattacaggcatgagccaccgcgaccggcaccaccttggtttttaaaatgtgatgaaaccatgttgtgtacatagcatggcttattattataagtaaatttgaaatcatgatggggacaaatttaggtctcaaaatagatattgtgtgacaaggttaggctaagacaaagatgttaaccttggccaatagttataggattacgtagataatagctgtatttttttttttctagtgtctgtagttcttcaggtgctttatggacacaggagagagttgcagtctttttagttaactgctgagatttaccaagcttgcacaaagtctgataaaatcataatatagaatgttctagggtccgaaacctgctgagacggataagactgatatctgtgggttgttggaattgttctcgtattgtgctttaaatgggatttattagctattctcttgagtttgattataacagccctagctagttacctgactaaacttacatgctcattagaggactttatcagtatggaagttctccatttctcattcagattcctctgtgctccccttagtagctgtcctaccagccttccctcttattcaattattgtaatataattggcagccaaactacttcatccattcaacaggagacatttgctgagctccaaattattaaatcttagtccccgcccctccgtcatccccacctcctgtgtactggtcattttgttaagttctgaggatgcaatgtgagtatgaaatggtgcctaacctctgaagatagactcataaaccactaactggaacttaacttttttataacttaaggcactttatagcaatatattgtgacgataatgatagagagtagggcacatagaagggagtgttttgttctttcttgtttgtgaggaaggaattcctgaaggaggggattttggtgctgaattttgagaggctgagatcatttaccaggccgagatggagaaaggacagactgaggaaacagcccaggttcagagccccaaagggctcagtgaatgtggaacatggactaggagtgaatggagccaagcgatggtggtacagaggggagaagaggctggaggtgcctactggcttgggttcttggtcaaacccatgtctagggccatgcatttcatttctgaaagtgtgaactttatcctgacagcattgtggagtcattaaaggtaaaataagtgttgcaatcactgttttcagatatgtgaaaagaaagcagggagcactttagtggctaccatcataatccaggcagacatcatgaggacccaaactaaggtgatgaaggtgagaaaggaaaggcgagactggattgaagaaatgattaggagaaataattagttattgattagatggaaagtaggaagggagtaagaggaaggaaaaagatgattcttgattcttctggttttgatgacttacatctgaaggtgtcattagtaaggatggaaaacataagaagtttagggacaattgtgagttcaagttgaagtggagttggggtgtctgtggggcattcttttgatcttaagaggcctgagccccaggagagaagtgagggctggagacaattattgaagagtgactaggattgatcgtggtagccatgaatgtcgttgaaactccacagggatggccaaaggatcaaagactgagcagacaaaagaagaggaaaatctgaaaacaaaagtgacaacattgagtacccggtgctttttgtttgtttgtttttatatattatacaattcttacaacaatctcctgtgaaataattatgttattgtcttttacagacagggtgtctaaacctcaggtgagcaacttgccacgctgcccagagagtaaatagggaaaagctgtcaggtcctatcagggcacagaagggtccggtagagtgaagattgaatataggagattggatctgacagttaggtattcagtgggtagtcagaagacctctaaagcctaacactggattgtcaccagtgaggaatgaggaggagttaagaagtgggggcatcaaatggagagacagcgagagagcacaggcaggagagcgagcagatacacgcgggtgtgtacacgtttgcgaggagttgtgtgtatgtgtgtgatagtgattagagcttatagtttggttgagaatagtggtgaggaagtgactacaagtagaagaggaaatcattaatggagtaaagttccagaaaagataggggggccaagttctagagcacaagcatactcaaaggggttgttataaaagggaattgggacgtttattccattgggacaggagaagacgaggaagagatatgtgtggctgtaggtgaatatgcaagtggatgggaaagaagttgagaaagtttgttcctgatggcttggatattttcagtaaaggaggagatgaaatctgctgagagtgtggggccttgaggagacagctggaagttagtaacagttacctttgtaaaaggagcccagtgctttaggatgagtgatagctgtgtgtcattgaaggcccagttgtagttttgtcagtggtggttaggtgctgacggaggatttttttttttctgtttgatagagtactgtaatatgaatagcatgaatgaccttttacaatagaacgcacaggccctgcctgaaacattaagtttggatggtgatttaaagattggacaggaggagagaaggagcagcagacttaacattagggaacttgagttctagtcctagttcttccatttaatggaagacggggagttcttcctcctcatctttcaatggaggaagttgcatttgatgtcctctcaagtcttctgtagctctcagaacttctgtgagatttgcacatcattagacaaaaatgagtggagaagagagtaagagcagctagactcccatcacttatcatttatgggttcttctgatggcagcgctaatcccagagcctttgggaagttgacagcatgaacagcaggacagctgttagataaccgtacccaggtgtctgcagttgtgtctgtacctggcaatgggagaggggtagcaagtcagaaaaggggaaggacaggagcatgaatctgtgatgggatttgcgtgtggggtagacagtttggatttaccctttgcccctcctgctgagtgccacggtttcctgaggaatcactggtagcagataatttagtcgtttcataagagaaggtgatgctctttgcattcatctctatgttgtttctctctctctctctctggttgcattttcttttttctaggctcatttctcactctttgttaaaagtgtagtattgtagaagagaatcgaacagttggagaaggataagtattcagaggatcttaccttaagagtcctttctcctttccgtttccatcactgcaccttgaatgtctttgcctatagattttgaaggatttcatcactcttctgagttggctgtattcttcctctggaaggtgtacttattcttcaaagccatttaactgtctgagcccccttttaagaacagggataacatcttaaagccctcaaggtgtggttagcattaaaaggtgaatccagtcagatgagtggctccagagattattgtaataatttaacaagcctaagcaggtgataggacactcctttgtaaattaagcctctaatctttctttatgctcatgccgatttgagagaaacctgggaatttccttttcccccattaagctattacacaacttaatgcttggaaaattcttcacaggaagaaacagggtgtaacagtttttgtgaggcatcttttaaaaatgcacccttttagctgaagtctgactatacaattgcctctccacctctttgctctagtttctttttgagagtcttaatttctccacataattatatactcttcaaagtgaaaatagttaaaaaattaaaaccacttaaactgaaagttaaaacattgttcataaatatgttcttccatttcctgagaaacaacaggaaagattgctttctcaaaataaactaagtagcctgagtatgaagtcagaccaatagagatcaaagattcacgcatcatcacacaatgggaaatttttagtcatttttctaaccacaaaaataagtctaatgctagttctgggggtttgttttgttgcctgtggcatcaagatatgtatgtataattcagaatgtacctttggcatatttgaaattgtcttagcctaatgtgactatctagtgtgtctgaaagagcctattttcaagatatatttgatgagtgtgaacatactacatatacagcaatggaaaatagccttcttgggcattaaatttaggaagaatgtagaaaaccagctgactttttttatctgtttagcatctagaattaaaattaaacttgctagatcagtaaataattgcatagctatgctagtagcaaaagtttagcagctcatgttgaacactgaaccatattgaaaaaggcatctgctacagtaatctctctctctcacacacacacacactctcaggtaaggataacagcatttattaatatttctctatttccagaaataagatatgagaggttattttaaagaaagaaagtaaatgctcttatgattggcagatttttatttgtgggatacaagcaagatgagggagcagtatatgcctgcagtattcatctgtcattaatttgtgtcaaataatgtgattctgtattcctcaaatgttgtaaaataggtaaacattttgtctttcacagaaagatagaaaatcagatctccaagcagtttactgctatgatcttagcttccttttcaaatcccttaggtattttaaacctaagtctttatatttaaaatgggtctcttgtagacggtatatatttgggtcttgttttctttatctactctgacaatctgtgtcttttaattggtgtgtttaggtaatttacatgtaaagtggttattgatacagttggattaatatccaccacgcttgtaactgttttctattcattgcatatgctctgtttctccccccacatttactgcctactgtggttttaagttaacatttcatataattccattttatctcctctttgagaatgtcaattatactttctttttaaaaaggttttagtgattaccctagagtttataattgattttagtttcttaaaacaaaaaaataccccaaaacatatgtatgtgtatgcgtagaaaaaaatttgaaggcttttcaacaagacattaagagtaattatcggggtcaggcacggtggctcatgcctgtaatctcagcattttgggaggtgaggcaggtggatcacctgaggttgggagttcaagaccagcctgaccaacatggagaaaccccgtctctactaaaaaatagaaaattagccgggtgtggtggcgcatgcctgtaatcccagttacttggaggctgaggcaggagaattgcttgaacctgggagatggaggttgcggtgagctgagatcacaccattgcattccagcctgggcaacaagagcgaaactccatctcaaaaaaaaaaaaaaaaaaaaaagtaattatctctgagtggagattataggtgattttgactttttataattttctgtattatctgatttttaaaaaaaataacaagcaggtattttataatcagaaacaaagctttttccattttggtgagaaagaaagaggtaaatcacagcgaaataagctgaaaatctatgattctaaaatgtataccctctctctgcttccaccttgagataagcacattatcccataattacttgcactccactagtgggaaaaaggaaaggggtttactgcttttaagcttgcattggaaaggttgtcagcccctgtcctataccttctgtgcctacacaatgaaaattgaatcctcagaatgacttggaatcagtctaccctgtggtttgacataaagttttctacatatgtaaagttaaccaggccccactatttctgcattattgaggttctcctctaagtagaatgtctttttgctcttcactatctttcaaaaaataatgagtaggattagagcacttgaaaaccactttaaggtatagcctttgccaggcaaggtggcacacgcctgtaatcatagcacttttggaggctgaggtgggtggatcacctgaggtcaggagttcgagaccagcctggccaacatggtgaaaccccgtctctactaaaaatacaaaaattagccgggcgtggtggcaagcacctgtagtcccagctagtcaggaggctgaggcaggagaatcacttggacctgggaggcagagattgccgtgagcagagatgtcacgctactgcactccagcctgagcgacaagagtgaaactccatctcaaaaaaagtatagcttttcatgacaactttgtaatactttttttgtttgctgttatgaaatatctccttttgggtggggtggagaggggatgtcaggtagtatctgtggtaataggtgaagagatgatagctaatgtgaggctgttggtccatctggatttcagggaactcacctccccaccttgtgaaatattagagaaaattaccattactgttctcatgatgttaattatatcttctgaagttttagaggtttacatataaaccaaaccccaattaaggtttaagaaagtggcatgacttagtgcaaacagatgaaatgttgatttctttaaaagttgtcttaatactaatggatcttacaggtgttttcaagaaagttataagttttgtaagtataattttagtaaataaaattttgtaaatataattttaattttggactttttttttttccttccttacttgctgcatcaaagtgaacaaatgacaagtgaaatttttttgagtcttctgagagaaggaagtttataaaagcagatgcctttttctgtacttccaggtcaaaaattgtaggcctccattttaatatagcttattgttagaacaaggaaatttcatttaagacaagaaatgaagtcatagttacattctgtttaaaactaatagaattaaacattttgacataaataaaacaattagaaaactttacaaaataaatgtaaaaagaattcattcacaatacactgattattacagctatgttaaagtctacaattgaacacaaaatataaacaattgttatttaagggattataagtaaatttaataaattttctttacaaaatttttggtgagatatcttataagaagtagaggggtcagaaatcaaatttctgggatgcttattaagataagcttgaaatgtaattgaatttttaaattcgcattacaagtcataatagtagactattcggtaaatgtagggagtaatggtaggtaatagcaaagctaggtaatttgactctttttttttttttaagctcattttcaaatgagagactccatacacggagatagtagtgtcgaacaatgataaaaattctaggagttgttactatcttaacacatttatctaagcatttacctatgttgccttggtgcctttgactgctgacattgcaccctttcgtctgtttttaacttgtcgaaattgttgttataacatttatctgcctctgttcctcaggtatagctgtgaaaatagaaatggttcggggttaaggattgtgaatgggaggaagaaataatcctctcattattttcaatacagggaaagaggattatttgtaaccctgagcttttaccccaaaaggacataaagtataataggtgatctttgcttttataaatgtgaaccataataactactcttgggaaaggattgataggccctattttctacttgccttttcatccatttattttgtgataattcctctatgtttcctaatcatttgctctttgaaaaaagtgagagcttgtgatcagtcctgcacggaagccagtacacaatctaggtattagagcagtgcattgacagagaggctaccttccattttgtgcttccaagaggtggttgtaaataggaaagtgaaaattgttaaatgacaaaaattactttgaagtaaatttctctgcctgttttagaacttaactctagatgaagaatcagtatattttggggggcagtaatagtaagaccaaaaagcaacgtttttacagcagtgtcagaatatctatttgccaagtattatttccactttatggatggggcctaaaagccagatagtttgtttgacttgaaggtcactggttaatgagccttttattactacgtaggttttcaccggtgctgagcaagaaagcttacaaatctcctacctaaggcatgcttatatccgaaccattccaagataaagaaaatgtacaatttaagcttttctggaagaaaggaaaacctcaacactttctgatctctctcagatcaatagcattttaaactaaatcttttatgcgaaaagttaattaaggcaactccaattcctttcttaacagaaatggttttacatcatcctccatgaagtaactaaccaaagacaggcccaccttcatctttctccttagtaagtttattgatcccagggctctttactcttacacgtccaattttaaaatgtacacgtggccgggcacagtggctcacgcctgtaatcctagcactttgtgaggccagggcgggcagatcatgaggtcaagagatcgagaccatcctggccaacatggtgaaaccctgtctctactaaaaataaaaaaattagctgagcgtggtggtgcgcggctgtaaccaaagctacttgggagtctgaggcaggagaatcacttgaacctgggaggtggaggttgcagtgagccgagatcacgccactgcactccagcctggcaacagagcaagactctatctcaaaaaaaaaaaaaaaaaaaaaaaaaaaaaatatatatatatatatatatatatacacacacagacgcattttgtacgtatttttaagattttccttgaaattctttttaacgttctccattcccccttttaaagttacttagaagggctgttataggaaacctcatttgctgcagatctgattatcttctgggataaagataggtagaagttgcagggagacatactttaggttaatgcaaggaacaaatcaacttcaaagccatgcagagctgggctgaattgctgggtgctgtccagggccttagcatcaagggcacttttgagagtctgtccatccttggccaagggagtagagagatttgaaacttcatgggagggtggggcagagatgctctctaaggttacacagtgtgtacataccattcagtcacaagctttgtgctagaaaagcccatgcttaaataccacctctgtcccctgctaactgtgtgaccctaggaaagtaagctaaattcactaagcctcagtttccccctctttaaaatgaggtcaaaatgataagaggattatcatgtgactttaacatacataaggcacttggtttagttattccttcccactgactttgtgattctatagtttttcattctgtgccttttttcctttctttcttcttttcttactctccagttcattcattgtagagccattaatggttttttcaccttgtattgtcctcttctttattaatacctgtgccttagggcctactagtggtgccagggattccctgagctcctttggtagcatcactgtccatgtcacatatctggacaagtcagcgaagaggtattggtcctctgtatcctttggacttggcatatgggcatccctgaagacttttacaaagccaagattcattgctactttagctttcctgtgttgtgtactataacaagttctgctccatgaaagcatcagatagcagttggatatagatggagaaaaaggttttgtacagggacttatggatgtagaaatctatgctggtaacatttattttttcttcatctaagtttctgtttttggagccaggcttctaattacaaataattgtatttgacagagaagaagaatatcagatcctgaagggccagaatgattcatcctctttaaggggaacatgtaacataactttggggaatagctatagatactaaaggggcaacataaaacagttattgattacaaagtgtatgaagacccagttgcttggcagagtgatatcatttagaaaagtggtagaatctcattcgtacacacttcatgactaaaagagctggttataccgttagattgttaaagctagaaggaggctttcaggtcactctatgcagcgattttcttctattaataataaaatggagatcagaagagtgaagtgactttttccttgaaacataactcttaatactaaaaaaggcaagtcagggagatgtgggccctaattttgttgttattttcttacatctagtgtaccaccctgactccagcctctggacctgggagtcatttcattgtagctcaaagaaggctatatataccctgttagcccatactgcttactaagttgttaatgaaaaagttattgttcttcataagagatccgtcttttgtccatggtaaatgatgttatgaaatttttggtttatttggttgttctaggttaggaataattgaagtaggccagtctttggacagtttagttctcctgtgtttagcactttttgtatttcttctctgtgctggatgtatttatgtttttcagtctttctgtgagttaactctaggagatgggtataactgtatccatttttgtcagatgataaaaagaggcttgaaatgcttaaacaacttgttccaggttatacagcttataaactggaactggatcccaggtgagttttccagagcacatgttcataattgctgtcttttttttacatttcctgcttcccttactacctgagtattgggggaacaggctgtggaactgaagattttactgtaacaaatgatccaaggaagatcatctggcctgaccccttggcttccagcaggaagggtgttttctcccgtgatttcatggatgagatattcaaggccttgtttttatttattttttggtttgctgtttcaaaataaaaaggcttttagttctttgttattataaaagtaataaattctcatataaagaaaatataggaaataaggagaattaaaaatgacctttgtagttccctagtcagttgatgaagagtggattcagatagctgtatcccctcactagccatttgactttgggcaagttttatagccttttcatgcctcagttccctgtatgtaaaacaagaataataatagtgcctgccttatatagttgttatgaggattacatgggctcttatttgtgaagcatttagaacagtgactggcacacagcaagtgcagcacaagcattggttggataaaataaagggctgcccatgtagtcttctggtctgtggcccctggaggaagaggcagaggcagacccaaaatgtagatcacgcagtacacaagtgggtaatgggctgagctgtgtgttgaagcagagacaggaagaggcggcctgggaacctcagtttctttttgcctccttagtgatcctaataacctggaatattaataaacttatgtccctcactttcaagatgctgaaaatgattatgcttcttttttttttcctcctagctttcagagagctcatggaaaccaagcctgtttatttgagatttttctgttgcagggtaggccagacatgaatttcctttcatgtgatattttctgtggtctgtgttatttagttcttcctttgttttcttgtgctttggtgtgaagaaagaagatgccctgtttataaagccttggtctttcatgtatcatgcattcttaaactaattccagttgctctgaccctttgagattttaaaattgctttgttccggtttttaagtacttttgaaatattaaaaatgttcatgagggagtgggtcatgggaaaaatttcccagggttgtttgttcttagaaaattgtgaatttgcatggagaggttttatgctgggttaaattctgccaggtgcattggtcacttgaacttgagtctggttcttttgatatttaaatccgtgttgttatggcataaagtgcagagctggaacctcttaaaactaaatgcctgctatgttgagctcttgccccattgtcccatcaaagaaaggtcttaaccagtacttgggtttgcattgaggcaccatgtcaatagtgaggatcaaaagattggtctgttctgttttttgtctttgaaccaagactttccaaaaagaacatagacttgttttgaatattgccgcctctgggtgtgagtgattatgcaagtcagtagcatttttgtttttttgttttgaaaaaactgttcaacatagatgcagaggtaagaaattgcaagaaaaacaaaaacactttttcaaacttgtacaaagccatctttgaatgcaggtggtcctcagtttacaaggagttgtaattcttccttcatctgatgaaagacaccactatccaccagttaccatttgaacactttccatgatgtatccttctcatttaactcccagatgcaatgaagtgccaagccctctcaattctatcttaaattttatctggtatctcttaactgtgctgtgggctgctgcagtccacagctccagttgcggcctccatcatgttttgcctggactgctgcagctgcctctgaactccagtgctctctatacattggaaccttatgtcagtgacctccttaacaccctccagtgaattctcattatccttggaactccttaataaggagttaaaagccagagtccttaagacatcaagaccttgccgcaggaaacctcagcctccatctctagtctagagtactagctttacctacccccgacccctcaccatcttccagacacaaaaaacttcttcctgtacttcttattggctaagttttcatgacaataagctttgactacagggtatgtctgatgtctagcacactttttccccttctgctccttcacttttgtttgggtaactcctgtgtcttcttttggttttaatgtccttccagaagctgtctaacccctaaactggattaggtccccttgctgtttccatagaacattttacatctccaacatttcacttattacattgatttgccttttctaatagatttcaagccccataagggcataaatatgtctatcttgtttcccactgtatcccaatacccagcacacagtaggatctcccgtgtttttgaatgaatgtggtccagatcattcccttattattacttgtagtagtgcttagcacacaacctgtgaatgaatttcattcctttaaagggagttttcaaaaaccattcttgttgattactttgcttaattgtactaaatatgtataaacatgaaattatatatatatatatatatatatatatatactttctgtgcttatagtttttataaaactattaaacattttaaaatcgcaaatacaaataatatattaaaacctttgaaatttaaattaataagatgaatgcttttttgccaacactaaatcacttatgttgattttttaaaatatgaagttgttccattgggtccaaatatgtacttaaggcatatgagtcttttgactgatagtagtaatgtagagaatacttatttgcataaataagttattcagaagcacattatgaactcgaaagccttgcttgctagctcaggactatcagaacttatcagatcgtaaatctgccagtgaatagttctttagttacaattttaatgattttaatgacttacaacttttttgttagagctgtaaatgtcctgttcattcaaagatgatgttaccatttcagaattactgacatcaactccaaatatatatctaattcaactattggcagaatcaggaacaggaatatgtttgtaaattttagttcttagagatatggaaaatttttaaggttttcagcatgcagccaagtgtcagactgttgaaggaagtcaatagattatagaaatgactcattcagattattttgaaaacaacttgaacagaactttttgttatcattgcctcctctttataatttttgaattgctgaaacaaaacctttgctctacaatacctgcatgtgtagcacataccttcatgtcatttgaccttcccttggtgtgtttctgcagattatgtatcaagtctgcctctgtcctttcctcatcagcctgaagcagttactatagtacattccttcactgtttgtcattttatggtgccatgaaattaaagtcttgctcaatgacagtcttaaattacattttatcattgccgtgtgtgcttatcagcaccccaggagtactgatcactgatgaggaatgcttggtgatgtggcaattataaatacacacttgggcatggtattgctaagggggtcattcggatggtccagtgtgcatttatatcagtttcctttagattaacattaagatgaaaacacaaattgaaagattattctggagaagtcatagactcttgaatgtgtcggtagttttttagagatccttagacccctgtttgagaacacttgcttacagcattcatagactgtgtacaaaaatacagccagattattgtgtttctggaagtgttctggcgtttctaggccattcctttagttctctacttttctttagcctttgagcctatccctacatcttagaaaaccccttcttggtgagaggaatgtcaagctttgttttctggtctcacgaaggcccgataggctctctgttggggtctctctctggctatttctggttacctaggtaaccctgcagcccatcccctcaggagcatggagaatacacacctgttgaggagggaatagagagagcagggcagcaaggagagttaagggcggcatgaggatttcaagtgtatcaatcagatagatacttacacttaacattaaaaggaaaaatcggtgtgatgtcgaccccaaagtcgaaggtattttattaagccaaacatcatcagggtagcaagtcacttagtatttgtgtatttttttaactgttttattgagatataattcatataccatacaattggcccacttagagtgtataatccaacagtgtttgtagtacatttagaatcatgtgaccattaccacatcaattttagagcattttatcacccgaaaagaaactctgtccccagttaacatcattctccatccttttcagtctcaccagcccctgaccaacattaatctgtagatttgcctattaaggacatttagaataaatgaaataatacaatatatactttttcataaattatgtagtcactttttgactggcttctctcatatttttaaggttcagctacactgcagcatgtgtcagtatttcatttctttttattgccagatcatatcccattgtataaatatgccagattttaaagtgtaccattctgtaatgttaagtatattcacattgttttgaaacagatctctgggactttttcatcttacaaaactgaaactatatactccacattttatttacccattctcatagattgggttgttttccacatttgggcagttgtgtataatactgctgtgaacatttgtatgcacgtttttaggtggagatatattttcatttttcttgcgtgtattctgcctaggagtggaattgaagggctagtcatctggttattctttaacattgtgaggaactgccaagctgttttccaaagtggctgcaccattttgcattcccaccagcaatgtcgtttttgatttgcatttttctaataactaaggatgtagaacatcttttcatgtgaagacatttaattaaaatgttttccttaaaataatgttttactagattctcagggttataacttagaaaggaaacatccttttagaattcttcaaggatactaattgtaacccaaattatgaggattgaaagacaaagagtaaatggctgccctcattgtaaggactgactgttggcaggttaggttttaagtagaaatggtttagcagtctcattttcaggaacatactaaatggagtcctgaactgggttatctgtgataagcaaaggaggaaagagaaaaagaggcagatgggccaatgtaagccattccctttcaagatgctcaattactagcacaatcaagccaaagaatggccttcaaatgatgagaaaatacataagccatctatacattttctagtaccttgtttggtgtctggcacaaaatatttattctgggttttgaagaagatagaaccttgaatgcagctgacacaccaagattttgaatcataaaatgtaaggattagaagctaatgattcccacaggaaacattataataagtaaaaacaggctgcgcaaaccgtccctgggttaaattcttaaagctactgggctccttcagattatgcaaatttcttcaaaactacatctgatctctcccatgattccctcaacacatgcatgaaaggtatatgtgaattccatgacacgaatgaggtttatttatgtaaatatacctcagcatattcccccaccccccaccaaataaggcacatcaattttttacaataataaagagctaattgttgagttctaactatatgccaggcacgtgctaagcagtgtacattgtgtcatttaattgacatagcaactcgatgaagttgatcctactcttattcctgtattacagaaaaggaaatttaggttcagcaagaccaagtaatttgcccagtatcataccagctctaaagaggctaccggaggattctaggcttctggtcagtgctctcaaccactgaacacaaaaatgtctttcttattccttttagtctgctgcagtaattgggaggatatagaataactttttaagtattgacactgtattttttgttgttgtttttttgttttgttttgttttgtttttcagacagaatctcactctttcgcccaggctggagtgcagtggtatgatctttgctcattgcaacctctgccttctaggttcaagtgattctgctgcatcagcctcccaagtagctgggagtacacacgcatgccaccatgcccggctaatttttgtacttttagcagagatggggtttcgctatgttggccaggctggtctcgagctcctgacctcaggtgatccgcctacctcgacctcccaaagtgctgagattacaggtgtgagccactgcacccagccaacactgcgttattttgactgagattttgtgattgctaccttggcctgtgctgactagaataaccagtttagagaagaacgtaaatgacctgatggagctgaaaaacacagcatgagaacttcgtgaagcatacgcaagtatcaatagctgaatcgatcaggatcaacttaatgaaataaagcgagaagacaagattagagaagaaagaataaaaaggagcaaacaaagcctccaagaaatatgggactatgtgaaaagaccaaatctatgtttgattggtgtacatgaaagtgatggggagaatggaaccaagttggaagatacacttcaggatattatccaggagaacttccccaacctagcaagacatgccgacattcaaattcaggaaatacagagaacaccacaaagatactcctcaagaagagcaaccacaagacacataatcatcagattcaccaaggcagaaatgaaggaaaaaatgttaagggcaaccagagagaaaggtcgggttacccacaaagggaagcccatcagactcagcagatctctcggcagaaaccctacaagccagaagagagtggggaccaatattcaacattcttaaataaaagaattttcacacggcgtggtggctcaatcctgtaatcccagcactttgggaggctgaggcaggcggatcacaaggtcaggagtttgagaccagcctgaccagtgtggtgaaaccctgtctctactaaaaatacaaaaattagctggccatgatggtgcacacctgcagtcccagctactcaggaggctgaggcaggagaattgcttgaacccaggaggcagaggttacagtgagcaaagattgcaccactgcactccagcctgggtgacagagcaagactccgtctcaaaaaaaagaaaaagaattttcaaccctgaatttcatatccagccaaagtaagctgccttttagtttttctaaaaaactgatagagatgccaggtgtggtggctcacacctgtaatcccagcactttgggaggctgaggcgggtggatcacgaggtcaggagatagagaccatcctggctaatgtggtgaaaccctgtctctactaaaaatacaaaaaattagctagacgtggtggcacgtgcctgtagtcccagctacacgggaggctgaggcaggagaatcgcttgaacccgggaggcagaggttgcagtgagccaagatcgtgtcactgcactctagcctgggcgacaaagcgagaccctgtatcaaaaaaaaaaagaagaagatagaaactaaaggtgtctcctggcctcagttttctaagtcaagaagagagtctagttaaattttgtgtacttttactacagatttcctatatttttgcaaaattttctcttaagttggtgcatttagaagggaaactcaataaatattttgtcactgaagagatgagagacatttgacaccccctccccaccttcccctcagaattcaacctgataatgcagaggctttcacagccatctagtcccaacattgtctataagatgcttcaagatagaactttaaggaaaacacatgtaggaggcagtgaccaggggtacttggaaataggtaccctttccaatttagctttgtgaacatttgttcaatttggtagtttttaagctaactaatagcattgtgggcattttattcttggatttaaatttgggtaatttctgtaggacgctgaaataccttctacctagacatagaattcaactttaaataatcctactttaagttggttcctgggatgaggtacttagtaatacagtattgaagtggtagatggtgaagttacttcctgtggtggtgtttcattcatgtctcaggttgcaaagttatgtaagttgtttacagcaaaatactagtgaggaagagttcatttgccactgctagaaggtacagactccccgcatttagtatgatgactatctttggtcttttcttgcagctgtcttgtttatagagtcaaattatcttatgtctatctagggttaaatgtcacagtctcatgggcaatgtaacaaagtttgtattttgtgctttgttaaagaaagctagtaggtgattacttgcggttgaatcggtatttggagactcattaatgattaattgaaaacacacacaagcacttttttggtaaccgcctgcgcatagcgttcttttggggttcagatatttagcagatacccccttccctctcctaaaaatatacattcattttatattgtgttagacttaaagtatatttgaacagaatatgaagtttatgattcttaaactatttgcatttacatatggtataattactcttaggtctctgacggtaatagatgtccattttttttcattaatactcttgtttctttctactgtttacaggaatactaacaaaataccttaactgtcatctcaaaagttaatgataaatgttaataaacttcattataaaactgttcggtgatttacaatttgaaaatattggcaacccatagtacctggtacctacggtttggaacatatggtgaatggatttatttcaataccttcagtggctcttttctgaaaaagtccattgaaaatcttatgaggccttttttgtacttttgcctgtttgtttgtttgtttgttttgttttgcttgcttactcctaaatactacctcgtatttgtccacttttacttttgggcacttacagcttttaccttcatttggcattggggccattatgtttctattgacctagtattgttcagttccttggatgatctcatcctcattacctggcaatctctggcaaagtttcacacttaaattttataaattgggatatcactttcctgagagtgtattccgtctgcaacgtaaatgcaagttcttttgggacaagtgccatagtttaaacgtaaattattcattgacagtagcaagcgttgtgcaaactatgcagtgctttctcagtaagtgctcattgagttgccctgtgtgcatgatgaccagctgtgttatctggatgtggaacatagcgttctgctatctgttttcagaaatgtcgcatatcccttccagggcagaccactcattgccaaggcataaggtcgaaaactgcccagtggggtggaaagcaaaggcagttggttagctgttggtgctttctttactctctacgaggatctttcaatggcagtgaccaggacttcattctgttatttgttatagaacaggcaagacatgaaccaacccagtcatattctgtaccaaacacatctgtggtccattctgctttccccagctttggtttcttcatttcacacgtccaagagaattttcttaaggataaccatcttattagaaatatgtctaattgataatgaaatgtctgtatttagctatttaactttgttctgggttctctctgcttacttaatgtgactgcatttccctgagatgaatgctgtgggtttttgcagtctctccccaactttgcccctcccctcttagatgaaggtgcatcactagagaacctgcaccactgtgtctcctacactgtgtcaggtagacagtacatgattagtaatgtgtgtgcaaagctttcatgaatgcttttaagaagttgaactcttaatattttgcttaatttccacatgtttaggataggattaatgtagagttgaaattaagatagcatcttgggaattttagataggaatcgtttgtgacccaaagtgaataaaaattgatattacaagcaggcttttaatccagaaaatttacttattctgtccagactgtgaacagttgttttgttctcaccaaaggcaattttggtgaagtgttcttagaaacagtgtgtacaggcttctgtaattgtacaggggagagatcatagagatccagggaacatcaagatactaattcaacctgtcctctttgaaaaatttgaccccctcccctgtaactcaacaacccctcaaagctgtcgatgcaaagttgcaaaataacaaaggcttctgtattaatttctgtgttacagccttctgggaagagaatgctgggagaaaaaatatttctaaatgtataattgcatatatacactttttaggttctccttgtatttttaatgacctaatactagaacattttgataagtttagttcttaaacagaactaccaaacacaaaagccagctggaggcagcaaatgactaggtggatgttgaagctcatgacttcctttcagtggcctcttctttgtatacagctccatgtttatgtccagatggactgactatattgataggttccagataaacaatggacacattagaagaggggtgttatcatcaaaaactaacaactgaagagttaaaatatgaaacatatctttgtcatgtaggattgaaaactatcatattttattgaatcaaatttatggcatgtttctcgtaaacctaaattttataatcctgtctgttaagttggttggcaaagcccaaatgttttcccttacattcctgaaacaaatttataaagtcaaagaatcagccatatcatagcaaatttagagtgccgtttgataatgaacgacctagtaggtcattaatcttttctatgggcagtgttttttttcctcatcagctgcctaaagtatttgggaaattgtatcttgtgggagttgccattcatcaggaaatgcttgttcatagatctaagccagaccacatgtagcagtaaatgttatttatcactatggaaaccaaaaatcacaaatgggatagtctaagtgttaagcattctgcttcctatggcagtaagtcatacccaaatttggttcacttcactcaaatatttgtgaggcacttaacgattaaagggtttgtaggtactttgtttaatgaataaatttctcctacacaaagctgaaaacatcataaagggaaaaactaggaggaagagttgccagtttatgtggcttatcaagctcataattgtagacccctaaattcggaggcagaggactagagttttagctgtggtgctgccagaagctagctgtgtagctttgaactagttctctaacttctttggaactcagttttctcatctataatgagatggagttggattctatgacctcgaagtgtgaatctgttttcctttattattccttgagaagtaagaaactatttgtgtgtgtgtgtgtgtgtgtgtgtgtgtgtgtgtgtggtaagtggggcataatatttggattcattatgtcaggagtagtgaagtttactattacccttcagtgactttatcacctaaaaaaagaacaaaaacccatgcttagtaaggatagggtccacatgttgccatttatctatggattctgccttcctctccactcagtatgtattgacaaaggatgtcattattatctagcaatgatgaagtattgcaataatctgaattgtagatgttgaattgactcgtagccaaaaggtggcatttaaggagtataattgctgttcatagataaaagtaagaataatgacttaagcagtaatccaaaaatgttaagaagttggtggaagaagaggctggctgaattgatgagtgagaatgtttattcataaattcatttaattcttagttctactgagactttaccatgattgtcattgcagtagttcctatacagtgggaatatgttcctataatgggaatttgaatcattcagtgttgctgatctggttgtatctggacgaggcaacttctcttacctgttgtctcattatttagtggggggaatatctatcccatccttacttctcaagaataatatgaggataaaaaaaacctgtataaagctacaaaccaatattattttgtacaggttaagtagcccggtagaatcttttggaattgattgaaaatacaaatgcctttttgacaggcattgctgttggattttttttaacatgggagaagtttactagatttcaaattttaaaatatgcatgggattgaaagttagaagctctgaaacatttaactatctggtctttacaaaatatcataataggtgtccattaaatgttcttcattcactcattcatttattttatagtttttgatcatttgctgaatgccaagcagtgttttagaagctagattatacagttgtgaatataacaaaatccttatccttatgaagaccatatagtagatgagtctgataagcatgtgtttcatggatatctattagatatcctttaataagtgctaataacaaaattaagcaagataaagagatagggcaatgagagaagggggtgttacatggtcagagaaagcctttcatatacaacagtgtaacttccacctcttttaaggtcttctttatttctatatgttgtcatctgacactgtacccaacacatagaaggtgcttattaaatgtttaaatgaaatttttatttatttaacaaacacttatagaggacttactctatgccaagcagtgttctaagtgccttgcaaatattattttatttgattttcacaagaacgctttgtatactgtttcattttatgaggaaactgaggcaccaggatgttgaggaacttccgcaaggtcacagctaataatgaatgaatcagtttgtaaaggaatttaaaaaataaagattcttaaaggttcttagtgccacctcttgctttcaggaacaccagatagggtgggactccatattttgggatcatgttgggtagggagcatgtcagcccctgaggtccttttgaaaagctcctaatacctctacctcccaggccaggcagataccactcttctccaggcttccatccactcagagctctttcctgctggacccgttggaagcttcgtctgctctgctgacacctggactttcctggggctgaggttaagtgatagctttttctctgtggttgaggaattacagctactagaaaagaatgtatcctcttcatccattctcctacctactatttaaatggcaagtagtgtttttatactgtggtccacggacccccaggattaaaaccaccgtggggctcatttaccatacagattcctgggctccacctcagacccactaaatcaggctttgcagatggggcccaaaaatctctattttaagcttcttaaaaactactgggttagaggatgtgcacttcccgtgtgaggggaaagagatgaagaaaagagttatataagacaggtttgtctccacagagagtgcagagaggttctgtaattctgatggaattctttccctgcctggttagagcagagaggtggcagggtagtgggagatcagatattaagggaaaatccatgtgaaaactccagagtcatttagaataagggttagttaaccgtggtctacaggacagctgcctgtttctgcaataaagtttctttggaacatagccacattcattggtttatgcattgtctgtggatgctttgcactacactgatagagtcgagtagttgttacaaagactatactgcctccaaagcctaaaatatttagcattcggtcctttatagacaaagtttgttggatagcttaccaaataactacatgaagattgaaaagtttctatctgctctccaatttggtagccactggcccttgaagtttggatagtgagcacatgaagtgtggaaaatgtgaccaggtaactgaaagtttcatattatttggttttaatcaattttaaaaattaatttaaacctcaatagccacatttggctgatggctaccatgttggataatgcagaactgcagaactaaagtgaagctttcagattgggattggctgtaaaatgtcaaatatgacaagggtctgctttaggcctctggaaagagggagtctaaggaaaggaacatctagataggatatattttagaagaaacttcaaacagttctttctctctctctctctttttttttttttaaatttgtgtttattaagagttacttgtagggatccagttctgccacttacagctttttgaccttggtcaagttacttagcttctctctgcctcaatttcctcattggcaaaacaaggataataacagtaccttttaaaatttttatgagctttaagtgtgtatgtgctttaaaaataccttgcacatagtaaaagctttgtgagtgtttgctgttcttaattattgttattattatttcatgattttttgtggcctaatctaagaaaataatccttacatatttgccccactcccccttttctgttttaaggaaagtggattctgaatttcagagtaatttgtatattaacctggctaatgcagcctgttcctaaaacgtggctaatgcagcctgttcctaatttagggaccagcggtggttcacctccttccacgcaggtttgttacagttaacacggttgggtccagcacgtgacatacatggtatggtattgtctaggttttattgatggtcactgtaaacttttatagataactgaaactcttcaaaaataaactaggcatttttatttagaagcagactgtttcttagtgttagttcttgttcctaagcaggaatcatagtaatatttgaaaggaagtatgtttctattttatcttgagacgtgtcagaatctcctaacatgagtatgcttggtgccttcccttttatagaagctgagcaggactggcaggaactgtttgagaggtgcgagttccctttgtttgtgtaaatgatagcagtgatagaaattgaaaaatgaaagaaaattcagaatcatgtcactatgggtttttaaaatccagtggctatttcttaactctttcatcttcagtattttttactaattagttccatagacttgcagtggataaacaatatcacttaaaaacctcccagaagccagtgagtgcagcttcttgaaaatctgcttctaagttttctgagacagcagtgatgtgaaaatactttatagtgcctagatctgttatccaaggctcgaacagcagagtgttcagcaggtattatgtgctcaacagttgctcatcaagctgcctttttgacctgtaagatggcattgccaacacctgttgatcagtacataatatgagaagaaagcccttggctagatggcaagaggtattttcttatgcaagtagtcccattctctaggccatattgttctgttggttgtcttttctaattctggattgtgtttgaatgtatctgagatgcattgaacttgcttagagtttccatggactcattgtacttagagcagaaggaatgagaacatggtcaactattaatatcctctagcttgaaactatctacagtctgaaactttagtcatcttagggaaggaggatatggaagtatagaagtctctgatgagggccatgtgcagtgtctcacgcctgtaatcccagcactttgggaggctgaggcgggtggatcacctgaggttaggagttcgagaccagcctggacaacatggtgaaaccctgtctctactaaaaatacaaaaatttagccaggcatggtagtgggcacctgtaatcccagctacttgggaggctgaggcaggagaatcacttgaacccaggaggcagagattgcagtgagctgaggtcgcaccactgcactctagcctgggcaacaagagcgaaaatccgtctcaaaaaaaaaaaaaaaaaagtctctaatgagatgtggcccatgaaggactggattgcgcagtaagcacagctgtttggctgcagcccctatttttctgtgcacatccgtgcacccccctgctctgtatctccctgctgcatttgtccgctagactttatctatgcttttctagcactcttatctacagccgttgacacccatttgtatctcttcagctgaaaaagagtaagcaatgaaagagtttatcctgctataaattcaatgtctgttcttctccttttgtttggggatgcagcttgcaatttagaaggtggttccaattatcaatttcctgggggtataaaccttattaatataaattgcagagctagaattaatgaggagagcttttgagcagaccgacatcagctcactgtaaggaaacaattgttgagaactagagccgtccagtagtttgctactgaaagaccttggaaaagctcagatgattctggtagagatgttgaaatggataggaagctggtgagatggttttttatgttgggatattgtatacttcaaagatattataacaaaaatactttcctggtaaatctgttgtgttaccttatgtatgatattgtgtataagaaacaatttcttttttcttaaatcataggtgaatgagactatcaaatgtggcacactagtagacaccgttgttctaatgatgcatgttgtataatcatttcttccctacaaatttattttaaaattaattaacaatttactaattatagtatacttggctgtattcagtagttatttgtttgggacctgctgtacccatcacagtgtgctagcttcatgagggataaaaacataaatatggtgctgcttttgcattctaattggaaaaagagacatgtaggttagctagaatataaatgaaactatgaaatgtattaaaattgaattacaaaaaggtaagtagaagccatttaattcttcctggagcaatctagagagatagtgtggactgaacttcaaaagaagtaaggttgaaagaggcaaggataataattattaacatttatttggtatttagttatgtgtgagacatttatctatgtgctttgcatgtctctacgacgtttggtactgttaccctcatattactgattggaaattggttggggcaaggaggaaatttgatatagatgtgtaagcagggaatgttgagtagtctcgtgtagctgactatagaatttgtggggacagggaactgcatacgagatgagaaatgtagactggagtcaaattatctaatccaaaagaaaaatttgactttccagattcatttccaggatcatctgaggcaaagtgtttaatgcaaaatacattggcattggagtgatgagctttagatttcagtgctagactgtaataatgtgaaatctcattaggttggacatttgtcataaatcagaaagaagagacctaggtttgatttttttttttttttggcctaccatttacttgctgagtgttctacattctgcagagatttaggttcattatccataacatgagtaataaaatttccccatgagtatgtgaaagttccatgcttggtgccttatgtgtatataggaaggatgtaataaatattagtggatctaaatcagaaaatagaatttaaagcagcaactcttgcccaaccagctagatacccttatatatatttcctttgtatcactcttcaaccttttgaattcaacaccttatttcttcttgcatggactgttgtgctagtctttgaactgatctattcattctattccaaatacagaatgttagattaattttttcaagcacaacatgttattgctaacatacgtatgtcactgtattacataatacagtgtacatattacataatatatgtaatacataatatatttattacataatacatgtcactagcactggaatctaaagctcatcactctaatgccaatgtattttgcattaaacactttgcctcagatgatcctagaaatgactctggaaagtgaaatttttgatggcactccatttcctacagaatgaaaagcaagttcttacctatgggctcttaactattccattattaatctcttctttttactggcctatctcatttccagctccatttctatccctaatcctcccagttcaatgatttctcctttatggttctttacatctttggacatttttcatccagtcatctattcagccaacaggaaggctggtaaaagtgggagtatgtggaaattctccttcgattgcatattctttggaaaatacaaagtgcaaggttttccagctgagggtggggaggagatttctaaagaaaggagaatgtatgaaatagtcatctaaaaaacgaaagaatgatggacttgggaaatatgctaggattgctaggctaaactaaggacccccctgagattagtggtcataagtttaaaacagtacttgtcagtcagcatggtgactgattttctccaaacatgttcagcagcccaggtacagttgcagagtaggtggagatttggacttaacaaaactgtggtttgtcagatgagtaagatggagaaaagaagaagcaaggggagctatggtgtaaggaaggaaggaagtgtttatagtaataaggcaagtggaagggagaacctaagggggctcaagacatgaatggcctgaaaaggcatgatcatgccttttcttaggcatgaattgtgatttccatccattaacctggaacagcctcactgaacttcatttttagcttctgtttttcatttccaaattcatagttgagtggtcattggcctgatgacccttggcccagaacagcaaggccatgctgagggtgcccctggctatgaagtaagagatggagttggccctgttaactttaactctgcgagctgttcatgagtcttcatctggaagcagtttatccatatccactgccttggtgatggagtagtgcactgggaggggctgggactcctgaggccctgctcagcagagcagctgccagagagaggaagataaggcctcactgccatcagagttaggaccaggacctatgtttctggttgtatgctgcctacggagcttttggatgcactctgggacaggagactagaaactttggcagttgtttgagaaacaagttcctgtagaacagtagctatggctatttagcatatgtttgttaggtccccttatgtgctaagccctgtgctgtgccccaggaacacaaaggtgaataaggtagagatatccctgctgtcatggtaatttatttcttgcttcctaccattcatttgtttcattagctttgctgtttaagtactacgtgctgtgcactggactggctattggaattttaaaaattaatatgagtctactcaagggtaagcagataaattataatacctttatatttactctgtgagatacactgcaggcgctgtgagtccacagatggtaaatgctgtgggagataatgaatgcagaaaagggctcatcccctgccctcagggaggttatagtccatctaggagaagaaaaccacagtacctccagaagcatatcccgctatttaaatttttcactgtttcattatttgtatgtcaaactccaagtgtttttgtattcccagcagagttctggcgccaaagtgctaataaatgttgattgaattaatggataaataactgtgtattgcaagacagaaattgacatgttgctataatagagagtagttcttttagaaagtgtgacatttgagccaggcctaggaaactagatggccgttccatatgagaaaagaagaggcatgccaaacaccagaaatagccacttgttaggcccaggaaaccacctggggttctggctggtaatgagcctagggcatatggagaaatgtggagagattaggagggaggacgagggcagatagtggatggggcttcaactgccagtcaagggagtttagactttatttagcaggtagtagagtttttaaagaggaattccagagctgggcatggtgatgcctgcttgtagtcctggctactgaggaggctgagacgggaggatcccttgaggccaggagtttgagggtatagtgcatgatcacgcctgtgaatagccactgcactttcaccggggcagcttagtgagacccccatccctcaaaatacgtgtgtaggcgtgtgtgtgtgtgtgtgtgttaagggacagtattttcagaaacttatttcagagggtactttgagaaactacttttgatagcaatgtagtgggcagattggagcagttagatccagttggatcaactaagatccaatctgatcttcgttggattaaaataggattttatttttgagaatgggggatatccaagcatgaccagagggtaaagggaaggaacccctgggttttctgagtgcaggatcacgaccagatggtaagggaggaggagatgaacagcacatctcattgggggcctggtcagcactggtattggaacctctcagtaaagtacctgctgaagagagatgccctggaggagccggcctaggctgtggattctgggcctttaaggctgctgttaaaatcactaactgtggggtttcagctaggtggggaaaccagaaagaaaaaacaggaggggctaatgatagaccccttgcatgctccagaacatctaacatgttgttcaagtggtataattgacatattgatgatcagacagaaaatgcagagcactgaacgttcgtctcttaggaccctaattacctcctttgtaaaacaacccttcagattctgttcagcactagcagcctgtgaatctgtcagtggagaaacatagggactttagaaaagctgggtgctttctgaaaacccaaacaaacacccactgccagcatccaactcaggaaggtcatccgatcctgtcagtgtgggtactttgatccatttagttcttattcattattactgattctttgtaggtaaagtttataagaaagcaaaccagctaggttagagcgtgtttcatgttaacctttttttcctttctcattgctgaagaaagtagggcacgttgtttgaacggcatctagtcatgctacagcctgcacctaaaattgcagatgggcctttctgcaagaatccttaatgcgtgaacagagattcttcatttgttctttatatctggttataaaagaaaacaatctcacagtaagccttagggtgggctgtagatgaggtagactttgtgtgtaatggagccctttctatttcctgacattagtcactgaaggaaaacgcccacataataataaaaataatacctaacatctgttcagcactttggagctcccacttgccatatatattcacatccagatatcagaagtcatatatgcgatgttacactctaactaatgaaagcaaagataagtattgaatatttaggggcatgcatttatttaggtaaggatttatggcgaagagcaggttccttctgttttttcaggcgttgacattggggaagcgatagagtggataagaaccgtggagttagacaaacatgggttcaaaccccaactctagaagcagggtgacctttagcaagctgtttaatgtctcaaagatcccagctttctcattgtaaactagaattataattcctctcagacttgatgtgacaatggaaagaaattaggtttataaaactcagatacgcttggaaccagagaacggcacagtaactggtaataacaattacttaaatggtgtactgttggatcttggcatcaggaacctttccttgcctttgtgcccttagacccgaactattacagttcccacctacatttctccttttaagatgctgtgtttgcactttctacctcagtcccactgatatcatgcttgatgttgcctccagctaagttatgacagcaacctcccagacaattgctagtatctctcatcctcccatctccccacaaccacaccacagatctcatataccatggtatgactatacattctaaacctattttatgttattgtgaatctgtaccatctgtctgctgcctattaaataaaactacactccctttaaattttgatatcctctgaaatctggcaaaatcttaccctttgactttatttcttatgactactcagtacgaatttttggcttcatccagggatcttaaccttagacatagaatgaactcagttctcctcagtgcctttgttcatggtgatcttcctgcctaaaatgctgcatatagcattgtttataaagtatggatgcatggatgcatgtattatgagtcataaaagaaacatgagggcccagaaacacattttccttttaaagaatgatgaggaaatccatatctagacacattcctctgctttccatttcatttccgccttgacaattaatatcctgacagtgttagaatgcattaacttaataatggtgtgaatacatcctagtaaggatagtaccagcgcatttaacagcctgaagaaagagattttaagttagggtgtttggaaagggcaaaaaggcaatagtaagtttcctatatatgtgcactaagaaatatctgtctggacccatcagagaacccttattctactgttgctggtgtttactgtcttccttaacgttgttttctttgagagaataaacacattgtgcttgggcatcagtgaagacctggtgtgcaaagagtgccctgctgtctttctcttacaagatcctcaattcctcaaaccatggcttcaggctgcaggctgtggaggcagaatgggcaaggagtcattttaagttcactccctggtttcctttacatcagttttcataagatgtaacctgatgtgtcttggacctatagacaaatgctattttgcttggtcttcacaatgtaaaattattctggtttgttgagatgctttacctcacttacttgcatttttccttctattcctttactccttaaagaaaagttaaggggtgagagtggggagaggaatagtaatgggagaatctgttccatattatacctcatccataatgaatctcattgccttcgaaatttttcctcccatttttaagagtgtagtgcctcatccatggcagttagtggaaacttaaatatcctaagatttatcctttgccaattcatttagtctctgaagagtgagagactcttctcaagtctcaagacagggaggtgctcttctcaagagccccggacgggggaggtcatttgtaacttcttaagggatggaagttacatttaggattttcttttacctccaagtttcttcttagaagtttaagtagtggaagaaggatctagtagctcttatactgtagcttactcagtaaaatttttccttatccaataaggtaagtacttgtaaaatcatagtagcaattaagaggctgcttctctctttctgttggcattcatttattgtaaagacaagaacatctttttagaaaccttaaagcacttaataataagcaatttaaataaggtgagaaggaagaaacattttcctcagtttttatctcaaaacatatggtgtattcgcagcccataagttggcagtaacagcagcctatttaataaaacggaaatatgcacgtgaggttaatcaggtcaaatagaagtatgcatatgtagaatgataacctcgaagaaaactgcaaatttattcatgcaaagagtggaggggaatgccataaatattaacagtggtccgaaacttacctgattttttattcttttacttgtatgtatttatattttccaaattttccttattgaatgtcattaactttataatcaaaaagtcactttttaaaaagacatttttaaaatggggcattttaatgtttttaaaaatgttttaaaaagacatttttaaaaagtgatgccaaatgatgggtgtgtgctgatttggtgatttgttatttaaattttatttcttagaagaaaaaaatgggagaaaagtgtaaaatgtgggagaataaatgattaaatatgacttgttgaatatactagtcgtttacatgggcataaatctggaaacctcagatatcttgaagggtcacaaagagccgatttatctgattaagttaattaatacttatgaagtcctttgagcagtgcttggatatgatatgcccttttttattgtttttattttcgtcattatcacgcttggacactagcacatattataataccttatacgaatggtagcattcactaaatgcttgttgagtgaatttttctagacttttcacaactctggttcatttagtagttgtgtcacatttggactttgatgcctggaactgaactgaacacagaatgacacacatgatctaacaagtgcagactgactgtctcctcccctgtcctggccattgtcctggtaatagttttttgatgagcaagtccctttgttgcctcataccaagctttcaacctatgaaaacactgaagtatctcatagatgcagtaactaaactagttatctttccctgatgtgtactcttgaattttttaatcaaattattaacttccctggtaatctaacctttttttttggtttggcccacctttcagcctgttaaggtgttttcattgctaactctttctatcctgtatagtatcctcttaagccttatgcaatcaaaatttctgcagcagtatcatgaatttaaaatatgggataggaggagagccctatggcatggcattcttcttcttattttctttataatgttaccacctcagttatttagtttgttggctaatgacagattagggagccacagggtgggaggtttcttagaagaggggtggactgatcataccctgagtttattatctgatgccacaggagaaaacagaaaagatgtaaaaaggcaccaagggagacgtgacactgtgcatttgtcaaaacccataaaactttacagcacatatattgaacattaatgtatccagatttttaaaagccatttaggaggttggaggatcccaggatgaaattcagactatgacaaaagaatccaactgtattacaaagtacagaataaactcactgaagaaagtgaatgaaaaagggttaccgacttaaataacttaggaactatatgcaagcactatactctattcgataaagttgtttcccatgaggatataagttaatgattctgaaactattatatatgtacactggaattgaataataagtaaatggatagtggatgatgagggccttggtttctcactttggaatggaaagttatagataagcaaggagggaaatgatccatgtggtaatggatttgaattggagataccgatatgaattcatgtttagcttgatatagatacaaaatacaaagaaatatttatagatatgtgtatatacacaagttagtacgcacacaatttcttcgctgtgtcacctgagagagcctaaaagcagcaatatcccagcagcaacaagcatatctggcatccagatcttggtttctaataccattatcctgtgaaagccaccaggtctcctggccgaatgacagattccagattctagagcgggggcagggaatgtgcaagatgaacttggagcatcttgtagtgctggaaagtaaggaagagcttaacaaacccacaatgacgaaggtttatcagagggacacaggagttactgaaatagctcacagtggccaaagatgaaataatttgagcaacaaaataaagtagtaatgaactgtaacccaaactatgaaatatgtacccatcctgatataaataaatgattgaatcaataaataaatgagggaaatagacaaatctgtgcagaaaaattccaaatgatttatgtaggtattccactctcaaagaagtgggttataatacttgtcatttccttaagtgtgggctgtgcatggtgacttccctccaaagagcaatgtgggaaggcagagaaacctgacaaatactgctctagtctggtgagcaaggttaacatcagtggtggtaagtcaggctagtgtttatgcttgatatgatgtgatgagaatggcactttacttctggggtcttactcccagaaacctataatttcaggctaatcatgagaaaagcatgagactaattccagttggtggtcattctataaaatacctgaccagtactcctcaaaactgtcaaggttatcaaaaacaaggaaaatctgaggaactctctcaaccaaaaggaacctaaggagatatgagtaataaatgtaatatggtatcctggatgggatcctggaacagaaaaagaacattaggtaaagaccaaggaaatctgcaaaaagtgtgggctttagtggataatatatttttattggtctgtgaattgtgactaatgtatgatattattaatgggtggagtatattgtaactcctggcagtaacttaaatttcctctaaatctaaaactatactgtttaaatgtttgtttaaaaaaaaaaaaaaaggcagcctggatgcactggctcattcctgtaatccccgcactttgggaggccgaggctggtggatcacttgaagtcaggggttcgagaccagcctggcgaacatggtgaaaccccgtctctactaaaaatacaaaaatttagccagctcttttggtgagcgcctgtggtcccagctacttgggaggctgaggtaggaggatcgcttgagcctgggtagtcgaggctgcagtgagccgagattgtgctcctgcacttcagcctgggtaatagagtgagaccctgtctgaaaaaaaaacataaaataaaataggccggatgcggtggctcatgcctgtaatcccagcactttgggaggccgaggtgggtggatcacgagatcaggagatcgagaccatcctggctaacacagtgaaactccatctctaataaaaatacaaaaaattagttgagcgtgttggcgggcgcctgtagtcccagctacttgggaggctgaggcaggagaatgccatgaaaccgggaggcggagcttggcagtgagccaagatcacgccactgctctctagcctgggcgacagagcaagactctgtctcaataaataaataaataaaataaaataaaagccttgaggattccaaaaacattgtaggagagggcagcataccacaccctaggagcctgggggcctccgtgttacaaaagtgttgattgatgctcttgataatggagctgagtcatcaagaacaggttcaactttgtcctgagaaccactaattcagggatgttctcactacattttcctggttacagccaactttttggtatttatagccccaggctttgtatgctatatcattcattcagtctttttcctgacatggtttaacctaggaggctcaatatgtagaattcatgtctgagtcagcctctccgtatcccctttatctcctggcagaatctctggttcctggctcaggcacatccatgtttttgatttttgatttttggttttggaattatcttttgacttaagaagtcacaaaaataatacagagttctccagtacccttcactcaccttcccttatgttaatgccttacataccgtagaacaattctagaaaccaggaaattggcatttatacaatactgttaaccaatctagaaaccttatgcaagttttgccagttttcctactaatgtcctttttctagtccaggatccaattcagaatcccacatagtacttagtctcctccaagccatgatgatagttcctcattctttttttgttttttattttttttagagacggagtcttgctgtgtcatcactctggagtgcagtggggcgatttcggcacactgcaagctccgcctcccgggttcacaccattctgctgcctcagcttcctgagtagctgggactgcaggcgcccaccaccatgcccagctaatttttgtatttttagtatagacggggtttcaccgtgttagccaggatggtctcgatctcgtgaccttgtgatccgcccgcctcagcctcccaaagggctgggattacaggcgtgagccaccgcgcctggcctcagtttttgtctttcataacatcaacactttggaagcatactggccagttactttgtaccttgtctatccatttgggttttctggtattttctcatgattagattggggttatgcatttttggcaagagtaccacataagttatgtgttcttccaagttcgtcatatcaagatgcacgtgatgctgatatgttttattactggtggtgataactgtgatctgttagtaaggatgatgtctgccactccattatagaattattgttttctcttttgtaataaatatcttgtggagagatactttgagactatgcagatatcctgtttctcatacttttgctcactacttttagtgtttatcagtgtcttgtgcctgcaacagttattgctgtaatgtttgcctaacagtgatttttgtctttccatcatttcctctacatatattatttggaattctgctttaagaaagagctgtcaaggtgcattcatttttagtaataatgataaccacaataatgttgattataattataatggtacccaacattgttattatgacttgctttgtgcctggcacagtgctgagttcttggtttcacttttataacaccttcttaattagctcatctgtctgcaagagttgtatttcctggagcaccctctccagcctttcctttccctttgttcctgtaactttcatttgcccctctgtcatcatccccctgccctctgtattaacaactctgggttctctcactccatactagactttggtctcttatctctgtatctccggttccatgtataatgtccatcacatcataagtgctcagaaactgttattgaatgaaataatttgttttgagcctgtgtaaccccagttcatcctacctgagcatgctacattgttccgtttcacattctgataattgttctttagtggtcaagccatatgtttgccccatatgaagctcacaatgataaaatgctggatatttcacagtgctgctgctgttaagccaggtgtcctgaacgccctcgctccatgtttgagtttttaaattatgtacaaggctttaggctgatccctgttaaatatcatcttgtttgttttagcctgccttttcaacctatggagatctttttgatacctgattctgttccccagcccatttgctatccttttcagcattgtgtgatttaaaatttttcatcttccaaatgattgataacagtgtgggataaggtaggaccaagttccccgcttggcattatttagcactctaggtgcagtcatttgacctgtaaggaatctacagaaccgtcactagattgatatttcctttttttttttcttttgagacagtctcgctctgtcgcccaggctggagtgcagtggcaccatttcagctcactgcaagctccgcctcctgggttcacgccattttcctgcctcagcctcctgagtagctggggctataggcgcccgccaacacgcccagctaatttttttgtattttttagtagagacggagtttcactgtgttagccaggatggtctcgatcttctgacctcatgatccacccacctcggccttccaaagtgctgggattacaggcgtgagccactgtgcctggccgtagattgatatttctgtcaaattcacaaggttattatatgtaactttgttaaaactttcttgaaatcaagtaaaattcaatcagacaaagtttatttgaaattacatgtcctcagctttcagttgacatgtggttaatttgttcattcattcatttatttatttattaaacagataatctataaacatctatatgacaggtactgtcctaggtgctgagaatagagtgtgaacaaaatagacaggatctcagcttgtggatccataagcaaccaaaaacataaacaagataatataaaatagctgtaaaagctatgaagaaatgaaatgagatggggactaatcaggaaaggcctcaatgaagaggtgccagctgagctagggcaggagtgttgagaagaagggaacaatgagaagatctggggaatgaacagtcctgcagagggatgagcacgtgcagaggtcctgagatacaggtgagcttggcatattcaaagaactgaagggcagccagtgggcgaaaacatggttatagctttcagttacttgaaaaatattcgttatcacttttttcctagaaagcatctaacttcatgcttaaaatttgactttatttgctcatttaactaggaaaaaaaaggtagaccagaattgcaagggaattagcatatttccccaggaacaaagtattctgaaaacaaaacaacagaaaatactggaaattatgcattttcaagattgataagaatgctcttgttttcccaagcatacattttttccctgaagtagatacagtggaacccatctatattgtaatgggacatacgttattgttctgaatgctttaatatctagtattttagaatgtcttttatactggatagtagtgtaaaatgccttgagacatgcagttggtttttagacttaagacctcttgatgattgcagacttactcttttttcagtagagcatagtggaaactaaagagttttttagatgaatatctggagtaatttaattaccattttaattgttctgtatttgcagataattggtgatgtgagtttttgactgacttgagattaaaatgtgctaaacccttacctgataactctcattagagcaatatatgctggaagcagagggctcttgttatggactaagtgtttatgtcccccacaaagtgttgaaatcctaaccccagtgtaatggtattaggaggtagggcctttggaaagtaattagggcatgagggctctgccctcatggatgggattcatgctgttataaaagggaccccagagagttctcctgcccttttctcaccatgtgaggatagacagggaagtcagctgtctgcaatctggaagaaggccctcaccaaactcggctgtgttggtaccctgatcttagatttccagattccagaactgtgaggaataaatgtttgtcatttaaggcacccagcctgtgtaatctgtaatagcagttcagactaagacagccccatattactcactctccatctgagagtgagccgagcacatagcattcttggcatcagtagcacaagggtatgaagggaaatgcttgaagataactggaatgtatagtagaaatgtgattcctgtttatctctgagtgttaactttcagaacataggaaattgagatgctcccttaaacattcttttagatagcaatttagggaggcaagctgaacttaaatcttttaggaaattggacagagtcatagcccattgggtttagaggtagtataagaaaggttgctgacattatttggctaaagtgaatggagaacagagtaaaccaagaagatagtgttcatgtacatcatcagcacaatactgagtaagctgaaatatagaaaaataatgtatgcttactattattggaatgtgagtgacataagtaaatttcataaagggaatataagtcaccactcaaatagttgtttctttcctttccttaagatacaagtgttccatatcttacgggtgagtacaatattggctgatgtgatacggaaaattctgtcaagttcggagacagccatagtgttgaaagttctgagtgctttcaacactatcaaatagtgctcatattctttcattgtcagattccatgacccaagtgtgtctgtaggtgaaggtctcccacccccaccccacccactgatcactcagtaagcaagcaggctgatgtctcagtgcctacagtgagcagtgttaactgactcctgtacttgcttgtctgaggacagacaggtgtgctagataattaacattttttggaaacaaaattattacattatcctaaaaataaatcaacatactgggaacacatgcaggacttttgtattactacgcaagaaaagataagcctactatattcatataatatattatgaagtctgttagatgaccttaaatttgttcatttttcttatttgacaagagttttaaatccctatgtatttacagatttggcagacttggtatgttttcttcaagctatcataaacaagcaaatggctcagaaaaattcccagctaggtaattttatctcaaatatctgcttaatttcaaaggcaacttgagttagccctgtgcaaactcaaaacactgtgtgtaaatatatgtgtaataattttttttctacgtaccacatgtatcttctaagtagcataatgttgcttttaaagatgtactgtttgtttttttacttttaattttctatgtgaacaaatttgacatgtacttttaaaaattaaaatatcttcaagtttctattcatatataatatttcattttaggcaacaattgaacttctgaaaagttgatgagacgttgaacttctgtaagctaaattatttttagatgtcttgaaagaactctaagaagatgaataatcataccaatttttttcatgattttagtaatctctttatcatgtttcttaaagcagtttacatctatgtataatttgtgaggcccaggatagaatgtctctgagtctgatactccagagtagcatactcagctctacagggaaaacttttccataggaaacatcagaaaaggaaaggtatgacagcacatgtttattaaacatattacataatatatgtctcctcctgacaggcaagcgttagaacctttattagacattgtcatcttaatataatgtaatgtccacaaatacattctctaatagacaagaaatgatacatgagttttaggtttccagactaacaacccaaaatctatggcttaagtggctttgtataaatacatggccaataacggcatattgccgggacttggagcagaggtaagagtgtggggagaggatcagccttgaagactcccttgtgggtgagtgggagggtagaggggtggatgaaggtggtaaaggatagatgggaagaggccaggaggtggggaagggaggggtcgtaaactttggttctggaggagcccttagagatcgtgtcgtctgacatcatcattgcacagaaggggaagcaagataaaaatgtttatgtgcctggctcgtggtcacgtagctagtggccaagcaggacctagaatgcagatttctgactcccagcacactttacacactgggagtttgctaagagtagctgagaaatacacacagtggcttggcagggagagagaggctgtgaagacttaacacaggtgaggggtgttcaggccgagggtagggcaagctcctgtgtgaagatcagggtttaccacccctggaggacaaaggtagtgagaacccagcacagaggtcaggactgtagtcaaatagattagcattcaggacagagtccagtctaagagcgggaaatcgccatatcacactagtgatgataataattactctttctttctccctttctgtctttctccctttctctctctctgtctcctctcttttcttgtgaatcatagttgttaataaacaagctaaatctatatagtgcgaaataaacatattcacatattctcaaaaaaaattactacttgttggatgcctattgtgcattagacattaggctagacactttattgcagcataatcatttaattgtcataataatccctttggaaaggtgtggtggttcagtttttgcagatgggggtgctgattgatattcagagagttaaataatttacttgaagtcagcagagtgtattagaaactattcattactttgggaccagaggggcagaaggaaatccaaaggaagagaagtatgcagatgtgttcagatacacactttgatgataactattgatgtatgtacatctctcttggctatgctataggaataccttaagtaattcagtggcaatataccttcttgctagtattttaatagtatagatcggttaatgaattatcttagaaacattatacttggtgtattctgttgctttatggtttcattttaggttgagtattaagggaacacagtattttaatcgggactctgccagtgcttttatctacaggcctgttgccatttttgtcttctgtgaaatttttgtcacaagaaaggcgagattatgttttttcctagcagattgagttggtgtagtatattcttggttatcaaaatacttacatagatttgagattttgaattggtaaatattcatgtggtgtttaaaagcatgatacatattgcacaatcttaatcccattaaattggatgctgtgtctatacacacgcaggacctaggaggacacgtcaaactgtaaactgcttgtgattgtggataactttgttctttgcttcttgtgtttttcagtttcctatcaggcatatattaactttttttaaaaaaggttatttttaataacctgaaaaaaaaactgatttgctgaaggtcaatagtttgctctgagagaggacaccatgatttgaactggtctgccttagccaaatctcatttgatttctgcagtgctatgttgccctcccagaatcacagataaaagtggtgggcagccgaggtgcagtggaggtagaggctgggacaaggtgcatcccggtgagtgcctggtacagggaaggagcagcatggtcatggtgtgataattggaggccacctctcctagcacagcagataacagaaggaattcccacctaaccgccatactcgctcctaagcagctgaataaagatgtctctgatatgtggctgaacctctgtatgtggtttagtgctcacaggcagccgatactgagaggaaaaaccttgggttcctaaaacttttaaaacattgaatacgagccagtaagcagtcattggtatactgcagttattgtaccagagttaactgatgctgtagaagtgaggccaccacatttatcaaatctaaaagcaattcatgggaggatggtgaaaaatggaaaaccgcaacctgatgaggaatcgtgaaatatctacgtgtggatgtttagccttgtactccacctctatggggaagggaaggaaagcgttattcattgagcatctcacaatgttccagatattagatgcttgccaatcctcgcaaattctacgaaggaaatactctcacttcctgtggatcaggacattgaagctcagaaagagctcatttgctgtggatcacatagctagtaaatggattcacacccagatatgcctgaattcagagtcaagtggaagaggaattagacttaaatctgagtggccccagcagcaaggctaggatcagtgagtgtaaaggagagatcggttaatttcatagactgatccaaaagaactttcttgtaataagtgctgttcccgaaatcaagcaaagtaccttaaacacagatacacatacacaaacagctttactaagatttaatttacatactgtaatattcacctgttctaagcatacaactacaaagtaccttttaaggtagtacatttcctgtcattagaaatgtttgtgcagaaagggctggaaaatctcccagatagagtagaggaatgttgtgtttccatctctatgaaagccagtgttgagtaactcaaaagcagtgtccatactgtgatgtgctgagtggctgtttacttaagtgttttaaatgtcgctggatgtaaaggaaaggaaagttccaaaaggtgttccagttgggcttttcatcttaaatttagatcaacgagatgagctcttcagcttcggaaacacccaggcctttcattctggctgcatactacagttgcagaggaacttttcaacaattcaggtgtagattcaagggcctaccctaggtccactaagttggtacctccgggggtgtggcctagcattacattagtttctgaggccaccccgcattattctagggtgcagctgtgctgaaaaccactttctttggctgaggagaggctcaagtgtgccagagggtcatggagggtcaaagttacaaaccaatcccattctgccggtgacctgtcttttctgcatggtcaaatcagccacatccaagttacttctagttcgccagccattgctgctgtgccatgtctggctctttgaagatgtctgacagtgttggcagttaaccagagacagttttgtgacttaataaccagatcaactttgtatgtaattcatgtccaccagacatttttgcagagctttaggatggagaggaccttgaggaaagaattaatgtaaactgcatcaccttagctgatcatcattcctgcttttagaacaatttgaacaattacactcacatttgaaaattttgtgcatctgttcttcagttgtgcaggtcacaatgtataggcccacatcaaaggatcaatgctttcagatttgtcttctatgtggaacttgtatggttaaatgattataatgtagtaaagtgaaaatctagtctgggagctagagggtgtcagaactgatggtcctggggatcctttgaaacctttctgagcttgtttctttgtctgtaaaatgtgaccaacaattcctgccttgcagtatcactctaaggattcagctaaagaatatgtgtgataaagtcttacaactatgtatttattgcaccccttccatgtgctgggtagtatactagtccctggggaaacaaacgtgaatgaattatgatccctgccctggagaatcttacagctttagtgaaggagatagactcaaaaccagataattgtacgagagtgtagaggggcagaaatgcacaggatactctgggagcatcaagggaggattaaaaggactgggttattggtgtagagatttccaggaaggcttaccataggcactgatggcaggcaaagacaggtaattaacaaggtaaattggagaaaactggatactttaggcagaggaaatgcaatgggcaaaagcctgtggatgagaacctggtagagggacgatgtgttacaaatgctgatggtgttttattcaattcttgctttcccctgggagaaatgacttttgggtacagtgcatcaaggaagattcagaaggtaaaggtggtgagagatgtaggttaaaaagtcatcgtctgttttcttagtttgcctgatttcttagtttgcctgatttcttagtttgcctgctacacaaagtgaagcagaatgcagttgagtgatttatgtccatcataaaaaaaaaaactgactaaaaataaatcttagttcaggccagatgtagtacatgtttaccacttgaggtgaacatcgaagcatagtggcacttactggaagtatctctcagagaaaggaggctgattttataaagaaagtctttggagctcaggaagtctgaaagctaagagttggtccacagagcactgaagataagcttgttgagcctcacagtaatttttgtctgtcccaatttttaggcagcaaaaccacagcagcatctcatcaagactattgttaatgcaggtgtctccattggtttatgtgtcttatccttaccctgtttccttcacaactgtaccatcttaggaatcaggaatcacaaagccaggtatccaatggtgatttcagttctttgccatggcgactggaggccagaggggtcagggaatgtcaggggtgcataattcttgtgctgtaggctttcctgccatacgttatcaagtgtactctacagcatcctgataacagcctctgccctgggaaacagactgtgaccatgcatttctagtccagcatatcctatcagaagaccaaatggcttcatcaaaaacagagtgacaacctcttctctttgcctcttctgctgactctgttaacaggcagcattggggcaggagagcctgcaggcctttcacggctgcttgagttctcacctgtttgtctgagctctgattcctctgccctgtaagcgtaaaggagatgtgctgagtggaaagacctctaaacaggcagccaggaagccagatttcaggtccatctctgcctctaactggcagctttgccttgggtaaatcatcagtgggcaatagtttctctcctgtaaaaggaaaagattgggtttagattgtttctgaagttctctctagatttaacctggaaggagttgaaattgctaaccttactcttaactgcaccattgcccagtccccagctgtcctcacctctgccccaccctttcattgccactgtctccttcatacttccctttccacctgacctgtccctgccaactccattctttcatgcctgcctctctgtatctggagggaatcctttggtgcccaagcagggttagattaccagatacgcagactaaacatgtgtttggggcaccagaaaagcagacaccgtgctcaaatattttttttaaaaaataatttgatatttgctgcttaaagaaataaagccgtgatcatgagaaaaagcagaccttagctggactttcttatacttattttatggtttattatttaaatttgatttctgtttggaggaacgctataatctttgcagtacgtcgtgcctctgaaggcttcgtcttcttcctcctcctaaacttgttgaactcagcctttccaccgaagcctcacagaggtagggagatgctgctttgctctacccttttctctgtactggcctcatgtgtgctgcttttagtatagtaacacatttctctatagcactttctaggtgagcatctccatgctgggggctaggccctggggcagaagtaggccagggagagaggcacaaggtgtgagacacactcttcctcctccagagtttataattgaaacatatgttttctccacaacaattaaatgccagaaatggccatacctatttgaaggcgtgcagaccagtctctggaagatgctcctgcagcagggaccttgaagagaagatggaggaaagtttaaccgtattaacaaagtgtgcatatctgaatagcctgctactttatttctaagccctaaatcccatgattgtggactgttggctgtttcccattttcagagctgccccaaaccagtttctcccagactcaggcattctctctgtgtcttcatatctcttctgaactgacttttgtcctttgagcctgccctctctgataagctgccgtagccactgagaagaatgaccaagttgagtccctgagcccacagaataataaaaggatgttttctttttctttttttctttttttttttttgagactgagtctcgctctgtcgccctggctggagtgcggtgacaccatcttggctcactgcaagctccgcctcctaggtccacgccattctcctgcctcagcctcccgagtagctgggactacagggcccggctaattttttgtatttttagtagagatgggttttcaccatgtttagccaggatggtcttgatctcctgacctcgtgatccacccgcctcagcctcccaaagtgctgggattacaggcgtgagccaccgtgcccagccaataaaaggatgttttctaatgggttcagtctggttgcctagggggaacatttggcttttgcatagactgtaataatccccatttctttattttcatagtctggttaatcccatgtcattgcctttgaagttaaataaattgattgcttaatgtgcacggggcactgtgctaagtgtggacatgtatgggctcactaaatccccaccacaacctctgaggtgagtgctgttgtttcccacttattgagaaagagggaaacagagatgttaggtaacacacctgacatcacacagctaataaatggcagagccaggattcttcgctctggcagtgtgactcctgtgtctcttctcttcatcattgcactgtatgttctctgagggtagagttgtgggtgtgctggagacagcatggggaaagtagtagcactctccatttgagttgttggactgattttgagtttctttctttcacagtgaaagttgtttgaattgttaatgagaggaaattttagaaaatgcttcacctttaatatattaggttatatctcttctctgtaacggcatcttttcaattctcttcatcactttttttgtttacctagtatgtgatcaaaattaaagttgtctgctgtggctgccttttcaatgaggtacacagtatcacattgccacatgtaatttccactcaggtgacactgttctcactgctgagagaaatggcaggattagcagaaagggtggtattagatattttatctcccttaatctacaagcaaacatggttacacatattggaatatgtcttttcaggattctggtggactcggttggtttattttaaggatgagagtttcctccagaaggttaagcattattacatctgctgctttaccacacctacttttggggtgtttgctgatgttcataactagcaataactgtgattcataaaaaggaatctcttatttttatgaacatttcaatctggtgtcttgagttgagcccagaaactttatagctggctctgagtttatttctcccaaaacataaatgtatttttgagatcctcttaatacctctggtatctgatattcacacatcattttatttaatgattctagaggcttggaaggctgctaaaagtcattgttttcgcctttgagaataattaccatcctggaatccccagtttagcctgagaccacctaacttccccctactcaggattcaagccagttctgtccaaggacaaaccagagagggcctaaagaattaaagtgggtggggcaggatgaaaacactaatagtagagagagctttctgagctatctggaaggatcgtcctcaccctctcccaatacttctgtcaaagttaaaaacatttcccccttagtttggctccttcgggaatccccaggcccagttgcagttttcattgcagctgtaagtgaccatctgaccactggtgaattcaagaaagttggaccttcaggctctttttggagttaatggagcatcctgtagtttaacagatgtgaaactgtttttagagatatcagctgcctgctggtctggttcctgggctgtgccttttcggttcagcccaggggaaagggaggaaggaaataaaatgaaatgagttcattcacttttcttccttaaaaggactgcaggaatacaggaggacaggggcatctgaactcagtgaattaacttgttcttctgtctgctccaggttatttcctttggttcttgctgacatgctttacctggagctctattggccactcctgcactgcacaggtattaggaccagactctgtaaggctgcagggagggatgtaaacaccttagcatccagagtcatgacttagtagaaaacacgtcagttttattatgagacctaagtttgagtcccagtgccactactattaattagctgggtaatattgggcaatcttggagttgaactttttgaacagttttttccctaacttgaagttggtaataacatttactttacaggattgttgaatggttgtgaggatgaattaaaatgttgaccgcgttaaagtcattttgtaagccatccagtatccttgctgttatagttctatgcacagctgattttttagttgcaggcaaacgaatttttacatggaagtacttgattttggaggttttaaataacccttttataaaggattgatagtttaaaatagttggttgtaaaaatgaaaaggaacttggaaagaaatgtcatgctgcccttcagatttatttcagcacacataaaagaagcctcttaagagttaagttttcacctgtgtcatttggcttagaaaatagtttgaagaaacttttcaaggggctaatgctctacaagggtcaaaaacctatttccatgtgctaagacatcaataatatttttaatagggctgtttctcttttgaatatatgttaattgtttccctctaagaattcacacagaaattggatatcatattttggactgcctcccaagacttttatgggatggaatatggtcaaatactcattcatgaacaaataaaaccaaacagatttgtttccctctcaccacatttttgcacatatatctttaataaatattcactgaaagctgtgagctatacaaagcaaggaaaactacccactattgaagtttgagggagccaagtgaataacccctctttccacaccagttagaaagataaaggagtcaggctggtagattgcaaaatatcatctttattactgatgatgcactttggagaatatggctttgggtctgcagccaagtaggcctccagaaattttatccctgaattagataaaactacccaccttttcttggcatgccagaataatggaagctggtaccctgcaggggaaagctgctttcccccagcaggagaggagtccagaattcgtgacctttgcagacaggcaaatctcaaagaggacgaagaggaggaattagtgagggggcagcaaggaaggcccggtgtattgtaaggaattctctcttggcgatgtaacatgaagagagtgagtaagtgtcctcttacctcaacacctgcagtagggtcttcaaaggtagctgagacctgacccctgcttaccagggacattgaatggggaaggaagagaagacctctctacaattgtatttgaacagttgtccttcttcgcagctttagctaaggctgtaaatgcaagtgggagcacatttttatggggcagccgcattgttccctggtgttttaactgccccccaactgctgtttacttctcacatctgaatcttctttcaagcatcacttttaggcttaaaaaaatccctatttgactaaagaaaatgagcggaacaattcctctttataaaatgctaaacagaacaagacatctggtactgtacacactgtagcccaaaggtgaattttaccctcaatataagcagagtatgctgtatgtcaacagtcagctcaaacagaagctcgagcatcgctgtagagccgctatcatcactgaagggaattcatcattatccctgttagtaatttcatagctttggaaactggtttatagtacttaactgaaacaaccccaaaatcccacccctgactctgccttttctattttccccaacttctgttccctttctaaagaacaagattttgtggaatttaaagtagactgtgactggccaggttgctgcttgctcacaatgcctgtcctgtgtgttggctttctcagccaaacttttgggagccagttgtcacccaggacccaaggctggcattctttggaaaaacctgcctgtgtgttgtgccaagttgtgttagccactccatgttattcttagatgggctctggagtatgaccagcctgtgtgcatgcatttgtagtaggcactggataagaactggagtaatgactacagaagtgaacggtcacagctctaacctgctgagtcatctcagctcagccttgctagcaaggcctcccaggctgcatatagtttgcttttcctgttcgttgcattccaacctgtcaacggctattttctgaaggtctgtgggggctcatgtagaaaaggaataggtctgggtggaggccaagaatctgaatttgtatcatgtaccctagctcatcttaattcaagtgttagtctgtaagaaacagaagaatgggtaactcaactcctccaaacaaatctgtcagcatttactcatgcaggaaggctattttcatgtatcacgttcagaacacaaagggtcccaaagggcttcccatctatctttcaggtgttgggcttcctgtcttccactgtgtcttttttttttttttttttttttttttgatactgagtctcactcagttgcccaggctggagtgcagtggtgtgatcttggctcactgcaacctccgcctcccgggttcaggcgattctcctgcctagcctcctgagtagctgggattacaggcacagaccaccacacctggctaatttttgtatatttagtagagacggggttttgccatgttggccaggctggtcttgaactcctgacctcagatgatccacccacctaacctcacaaagtgctgggattacaagtgcgagccaccatgtccggccagtcagttgttttaaatcgtgtattgcctatgagcagatgaggaagaggaatcacactgtctattgagattactgacaacctttctaagcctcattttctcagagttttagcctcaaaagggacattgatcaatttgtagtctgatttccttcttttctcagtttacaaagaacttagaggaattatttcatgagtcccccaaaattagtcatttcctactttgtgaccccacagcattttgttcatactccatattttaagtaaacactgttttgtaattaatgtgtttatatgtcacttctttccaccatcaccaccagcccccttgcgccaactgatttcttcaagagattgaaccaggtctaatttatgtttgtctcccaccaacccagtgacagatagatgaatcatgttgcctggagaggttaagggatttgcctagagtagcagccctgaaatgtgagtggctttcataactcccagccatgtacttaccactcgtatgttgccagaaatgtttttaaatgatgtgaattcatgcaaatgagttaggacacaactttcccattatgttcctctacactagctcatttataaaacattcataatagtgatgatgatgatgatgatgatgtcattaccacccacccaactgtatcattttaaggatcaacctaaataatatttgtgaaagctttgaaactggcaaagccaccttatgcaggtatatagattgctattactctagtctgttgttatttctgtgtaatttacaaagtatttcatattcatcatctcacttctcgttacacctctgtgaaataggtggtctcattgtcatttcatagacacaagaactgaggctgagcgagactaagtatttcaaccataatcacaaatggatgaaagaagactagaacccagccagccctcttgctttcttccagtacagccactagatcaaggctgcagagtccctcaggggtgttgttatcatcatcatctgttgaatctgttgcatcttctgttgtgtgtttaggtcctcaggtccctaaagccctcctgggtgagcccaggaaagagacaacttcatgagaaatgagagtgaggcccttctaagaccagttatgtatgtgtgttgaaatgctagtcaggtttttcattttatcaaaatgcagggcttagacacagaatgctttataagacaaagcaagtttgattttgaattggccgaccattgaccatgttggaccagcagcagcagcatgtggatatgtgggtccaggcaggaggggctaacctctccatggcttctgtctcaatggggagttccttactgtgactctcagaggaaatgaaggatgataaatccagctgctgcttcctgtttctataatttggggatttatttttttaaagggtagaatgctttatttttaaaccagtggaaaataccctcaacgtgttccttgttagtatttccttgaaatctagatgcactcatttgagctttaaaggagtgggtgtgtttgcgtgtgtgtgtgtgtctgtgtgtctgtgtgtgtgtctgaaattcccatgatgctgcctgagatggctcgctctctttcagtttttcaacaacaataacaacagaatgaaaaccaattaaggcagatttcactgggcaggaagctctatgtgagattgatgacagtatctgatttagaggaggcctgtaatttatatctgtggtattactatctctctgggtatgcttgtgcaattcaggtctggtttttcttctgcttgtgattgtgtcattagtaataaagtcccgaggcatttaggaaacacactgccttctcacatatcattgtttacagacagtagctgtttggtatagatgattaggatgccatttttggagtttgattatgtagcccctgactccataactaaaaccaataggtagaaatatattttaccagtgccattttttttttcatttcctaatttaagagacagaggatgtatatggggttccaatggtacatcgttcaggagcagcataggaaatttatctggcaaaatagaattataagaatttagtagggccaggcacggtggctcacgcctgtaatcccagcactttgggaggccgaggcgggcggatcatgaggtcaggagatcgagaccatcctggctaacacggtgaaaccccgtctctactaaaaatacaaaaacttagccaagcgtggtggcgggcgcctgtagtcccagctacttaggaggctgaggcaagagaatggcatgaacccaggaggcggagcttgcagtgagccgagatcatgccactgcacttcagtctgggcaacagagcaagactccgtctcaaaaaaaaaaaaaaaaaagaattcagtaaatataccaaatcccctcactgagtaagaatcttggctctaatttaagtcccttagcccctcctttcatgttcttaaaatcatagctaaggtactattcttcttatagtgggtgatcagtacatattttgtacttacgaaccagtaggcctaagtgagttgtttattcttttaagaattatggttacactttaatgaattcagaataaaaaataaatcttcacagcctaaatttagtgaagagattataccgaatatttggtctgactttgttaacaactttttgaaggtaagatttaaaaactttgagactatgacacttactggaggactgttccagcacactggatgttgtagaagtctggaattctcatctccattctgccatttccttgtaacaagtttcttggctataaaataaagttgatattatttgtttgtctcatagtagtttgtgaggatcagattagttggaatccatggaattgtcttttaaaaagtgagattatgataaagaccttaggtaatattgttattaaatgacagttgggttgttgtttcattttttaagactttactccttgtgcccttaggcagcctttgactaccagcattttgtcaccttcactttaagggttccttctagtgattttttttaatttgtagaagcaaatttaatttaatttgagttaatctctagtttaaaataagctgagggggcaggtatgggcttcatagtgtcagtcagatctgggtttgaatcctggtccaccttgtattagctgtgtgatctcggtcgaattactcaaactttcaaaacctgttttctctcagtaaaactgaagcagtaataccactgctcaggatggataggacaatttaataggctcaagtatgtaagtgcttggttattcaggaggggtaattttcttcctgtcttcccctgcctattagcagtagcctcagtgttgaatggcaagatacagcccaagattttcctgtaaatatgccagcagtgcacagctcctcccctctctacctcatctttgtccctgtataccatggtcaaggaaatgagaagtaaactagccgctgtaggtcactgacactctccttagaaatgctaaatatttcttttcccaccttcttttcagtgtaatctgacctgagttctctgaatgcttgaccttcccagggagtttcagcgggtgagaaagcctgacactgcttggattacttgaatatatacagagctactcactcatatgtccatgcatttttggggtttttttttttttagttatatagtttgtggaattattttgcaagttacctttttccctttagacttttcaaaaaagaaccttttaaaattttatgacgggataagcaatatggtggttagcaagattaatgtttaccagtttgctgaagggaaaatcaaacaacatatgtccaaactctgtttaagaatttccatgggattctgaattccttaatctctgtagttttatgaagtcatagcaacatgccgcatacttgagttatagctccttgtcgaaatgtgtttgtataatttgactttatgttcaaaataagaaacaagtagccgtaagaaaaacatcttggtactctctcaccctgctacttccaacttttacccctctactcctttcctatcctgaaaaatacaccctcccatcatacctgcctcccccgcttgctgttgtaccagccttttgtttcatccccagctgagatttgagaggtgaatattcactttcccacatacccttgcacacgtgagccagactttttcaccgaaagtgctcaggccaaagtgtcaggtgactctcagctgccagatccagcggtcacttttgccccttaacgtgcgtgacttgcttttgacacctgcaatgctgcttaccactctcttcctgaaggggttgcctcttttggcttctaggccaacattctcttcatagttcttgtcctctgacccacccttcttcctctcctctgctgaatgcttttcttctcccagttccctaaatgctagtgatcccctggattctgccattggccttttttctctgtgtatgctctccttggattatctcatcctgcatatgtggattagtcacaaatctgtaaatcccagatctttctcttaggattcaggacaaccaactactagataccttgacttaaatttattatgccactaccagctattccaactgaaaaattgaattgagtggaaatcatgttgactatagagtagttttctccttcatctccctgcctccagtctttcctcccttcaatcttgcttctacattcctggtagaattctttttaaaacggaatggtgacctcattgcctcacttgttaaaacccttcaggggttccttactgtccctttgtaattaggatcttacaatattgaactttccctgagttgtaccctggaaaatctccccatccttcaattttccaaccctcaccccccacccccaccctttggtgttctgggaaaccacaaaggactatcttgttctccaatattctgagattagacccatctctgtccttcctgactcccagatgacttccttgtttacctgcctctatagaactccagaccctttccttttctttgagacagccctcattagtgttttattccagtagcttgaagaaaatcacctccttaattgtctggtgcattttggctctcacaagtcttaccctgttaatttgttacagttatcattctatcatgttatgtttgtttataatataatctctacattgtattatttataataaattacaatatattgttcataaattgttagtataaaatactattttatgtttatacttccactttaagtccttagtgtttataaaatacttgtatttataaacaaggatgaattataaaataagtctgtccaaatctatttctagatgcttttaagaggtgttttttagtagttggaggttttattaattatgttaccaactaaactgctgagacacccaaatagaatgacttaaataagatagatgtttatttcctccttacagaacagtccagatatgagcagccagcaactggcaggatagcactcctgtgctacacacgtgatttctaaggttgtcctgctgtccccatttctagcccgcaggaaaaaaggaaaaggaaggccaagtcaagtagccttgtcttgtagccttgtctttatgaaggttaccaggaaattagttgaactgcttcttacatcctgttggtccctcctcattaggtggccacatctggctgcaaatgaggctgggaaatgttatctctagatgggcacctttgcacctagctaaactgggtggtgatggtggcaggtgtatgttactaaataatgattttgggggcacacttagtagttatcatagaaatggaagactattttgattaaaaagtcaacttgggaggaaatgagtgattaaaaaacatctgggcctaccctataagcttcagtacttgccatatgtaagtaacaggactcaatacttctttcttttttccttctagaaaagtatgccatgcagagttaagagtatgtaaatttaaaagacagtttgtagctcttactctcaaccagtgcatttgtggtgaaaatgggtggcataggatacatgtgcatattacaaacaaatgcttgcaacatggaattctctctacacttttttgtctcattacttatattttcagattcagtacaacttgtggtatcagtttatcaccatcttcgaaatattttctgaaagatgatatattttctaagtggaagaattattcctttcctgctctcttgtattcctcactctcaaatgtcttagataatttgggtcaatttcctggctgatgtcccctggcctactagtaatggaatgaatacatgcttgccgacatgcagatcctctcaggccatggtacagggcagcctctaaccatgagcagcttcagctgtttcctgctttatgcagtacggatactgtcatgttgtacatatattctgatacggaaaagtgtgggaaatgctgttttaatggtttatgccaatttcatctctttgtactccaaattttttactagaaaataattgtaatatgtaacatcctaccatggtaaaaggtcagtccccttggtaaagaagtaaaaattatcttgctatgttatccactttggatggactgcaactgtaaaatatctaagatatgatgttgtgtccggaattggtgggttcttggtcttactgacttcaagaatgaagggctggccaactgctccgagtgcggggcccaccaagcccacgcccacccggaactccagctggcccgcaagcacagcacgcagccttggttcccgctcacgcctctgcctccacacctccctgcaagctgagggagtgggctccagccttggccagcccagaaaggggctcccacagtgcattggtgggctgaagtgctcctcaagtgccaccaaagtgggagcccaggcagaggaggtgccgagagcaagcaagggctttgaggactgccagcacacaatgtgactacagattatttgcctaaaaatatctatacttacgtttatatgtcagccatacataatggcatcagacctttctagcccatgtggcctataattagggtgacagtaacacttggttttcctggaaacgtccctggtttttgtttactattactgcttgttgctggtctcagttatcacagtttttttttttttttgcatttatacactttattgtctttttaaaaattttttacatatagtgaagatggggtcttactatgttcccaggctagtctcgaactcctgggctcaagcaatcctcccaaagtgctaggattacaggcgtgagtcactgcacggggccgtgtcattttagatattagcactgcttaccctaaataattctgggcagaatggtggtagtggtccatgctccgtcttttccaaactacttaagataagtatgggtggatctttaagctcttggagggcaaggactctatctatcttgctctactgtgtgtgtgtgtgtgtgtgtgtgtgtgtggtgtgtgtgtatgtgtgtggtgtgttcagcacctagcacattacctaagctaaacatttgaaaatgtaaatgattatgagcttgatggcttcatgacaacacagatttggtaaagtctatgatgggcaagatactttgttgccaactacaaatcctaaatacctaacagagtgtagcgtttaggaatgaatagattaatgattggtcacctcagtcttatatatttcttagcatttgcagtctctatctaaagatattgtggtccatcaacacattagacaatcctacaattacagttgtaacatgttgtatataaagtcacacaaacaagcaactgtttcttgggtataatgatccgtgtttactgttttttgattttatgaggaaaaaagatggcatttaattactccaataatgatcacatcgtagatagataaattctatcacttgtaagatttagaccttaatttgtaaccaatgtatgatattttaggctggaattcccagtggatgtgccaggaatggctactggatggctgaaatattcactcctttgggcagggctggagaccctttgcctgactgtattcgccctcttcagtttaccccagggcatatataaatgtcctttcctctgtgggccataaagtgaaacagattgggaaacactgttaatgacctctacaaccaaaatagcaggtgcttaaataaatgcagtggcacccttgacatttgagtatgcaaaataatttttcaaaaatgttatcttgggccattttttgagagttaaatagatgtgctttatcagaaagtaaatatccaagattatcaaagtcaaagaccataatcttcaaagaagcaattcatctaaaataagtaacaacatactgaattagaaagcatgttctcacatgaagttcacaaaaaagtctcacaaaaaaagagagaaagatagtatgtttgtttatattttggaccttcccaccacaggaaggtttaagcgtgtttatgaactgcaggctgctcaattgcgattcagtcctacatctctactaatgctttattgcagggggaaatgttagaaattatagcatcatgacagtggctatctactaaaattctgccagttaagataatttggggaaagggaagaaaccattaattccaagcacaccttagtttgtgaagggcttccagttaaatgtcctatcagatctgcttttctaaagatcatttgttattttcataagagctgcacaaatagatgctaagtacttagaaacagaattaaataaatcaaatgtgaataaaacatttgtttgttttatcaaatcctttgaaatagaacaaaagttatatttagccaaatttaccaatttatcactaaatcgaaaataaggacttgtttgtattacttcgaaaggccaaccctttaggggaatttttatttagctctaaaatgttttttaatgtcaataatgaattccactgcaatagcgattatattgccaaaggtcattaatgatttttaagtcttcattacgctttaatgagattgagattaagatctctgtaatatttgactgatgtatagtttaactctgtgtctcctcatcttttgattttcttgcttttctgttctctcttttcttcgttgattttttttttcttctcaaagccttcatgatctttatttttcccctgtcaccactacatttcaaatcctgggttttcctcaggggccgccaccttccccaaatttttctggacatttaaatccaattttgtggaattttcagggtaggaacattcaatgagcgggcctaccatgtgttcaacattagactgggtggtgtatgtaccttgtcacagtggggttttatttccatttcattgataaggaaaatgaaggcccaagtttacacagtgatgtgaaacattatctgtgttcctattgtacaggtaaaaggtggaaataggggtgaaaactcaagcaagctaactacttaagccacattcttatccagtatactaccaacttaagaactgaatttctagtttaaattagctctataatagagactctaggctatttgtgtttaaattattccatctgttagatatctttatacaggtgcaaactatttgccctaattagcccattaatctatccattttattcaataccttttctaccactcacaacctagttttaactacctacatatatcctttgcctggagtcatgcaatagctgctttcctgatcttatatcttccctcactaatctgtatgctaagcccagagtaatctttaaaagggacaaatttaattttcatcaacctccaatctgcagctgaaaacacaccagtgacttaaaactgcccttagtttgatgacatcaaactatgcttctaagcatcatctcacactgcatgttcctgtgactcttcaagctttgggcactagccttctttcagttctctggtcattctttgttcccctctctccacagggcctttgcacattctgggccaccatactcctatactctttcttcacacctcccttccatcacgatttcctcagaaaattcctccctgatcttgccagctggaggaaacaccccattatgcactttcatagtaccatgcaagcaggggaaggtccaagcttcctgggatctgaaatttttgtaatttgaggggctgtctttaagaaaaataaaattagagatacaaatatgagtatagggccttggaagcggtcagtgcgaggatagggtcctgacccttaacctttcactgcatggcaaatctacctcagcctgtacctcttgttggtagctcttcacattgacaattcaatttatatacacaactcggtgaatatttctttcccctacactatgcactgtgtgagagaggaaatatgtctgaatttactccccaagctttctccaggaatttgcatagtgttaacacttgagtatacagtatatatttcttgggtaaaggaataaatgagcaaatgaataattagaagaagacttagagttaatgcttataatgcccgtataaaattgtccgaattttttggaacccaaagccaagtggagaacatctgggttccatggctcataccatttcatcatgaaagacaaacttctcagtaccaggtggtaaagatgaatgttgataggtttatttatataaagcaccttattccacacaatgaataataaccagcagctgttactcagtgcttaccatgtgctgggcacttgctcaacacttgcacatggtattctgccttaacacatatggcattcaccactaactgcagagttactctcagtcagaatttctgcctccatggtccatgcaatgcagaagggcagaaaaccccatgcaggacaaggaaaaggaggcctgaggtgctggcaccttcactgtctcaagggtcctccctctctggagctccttcctctctgccattttatatcaccttttatgtgctaaaatggtgtttgtttgccactgccccagagatgatactggcttatcacctgccctctgcttagttcttggtattatctcctagtgagggtatgcccaagcttacctttgtctttgttttcctgtagagtgcttaattatgagtcaaactacatgcaggtggtctatccgaatgagttagcatcagaatgacctgttaaaaagagttctaatatgttgcccagctggacattgaaaaatgcctgttagagttgttgatcattttgactttggtataattaatagtgaccttttctcactgccagtatttggttcaggttgggtgccttctgagcacccttctggaatgctgtacagttgtgagtgattcattctgttaacaaatctttattaagtgcctaatctgtgctgtgccctgaggatacgcagataaaagaaactgtcctcccattaggtggaggcattgaaacccaagtggaggaagacagggagacagaactgacagttctgcaagtatcatgagcagccattgtctgactttgcattcatttctggtcttactggctagaatctcctaataaactaccaagtaatccttttaactgaataagctacctatccaaggattagaatttgtatctgagtgtttttctctcatactaactttgagaactttttgagggttagtgaggtaagcaccagagcaagatactcaggttcttttccagcaatctgtaccaaaccaggaataaggactgacaggctcccagctgtctgtcaccagagcagatatttatgggtttatgatcagaggttcttttggtcccaaaaagtaactggaaaagaatgtggcaacttcctgggaccatggaaagctgcttgggtgtcagggatatgctatgccaggtatatgctagaagaaatactattaaatgtcagtaaacttaaaaggaaaatggtcaagtttaatctaagatgtccattttgcagatggaaagaagcagggaatttaaaaatgcaagcaaagctcccattacaaatcctactaactgtctcataaactggatgaagttaggcgataaagttgaaccaaattcttcactcagtttgggatgactttctctggagcctttattaaggtctcttagctgccagactgttttagggactaatgaaactattgtcattatcccttgctctttttatgtttcctctaagttgctttctcagtaaggacagcttttaattttttaaaaaattatttccctttttaatccccagaaccctatagcaaaaactccataattatttgttaaagtttctagtagagggtacactaagtggggtctatagatactgaagctcttgtgaaattctgctggcctgagttcatgatttaagggaatgctggtgatagcttgtagaagaaactgagattgtatggaataaaatgtggaagccattgattttagagcctcttttttattgttctgtgaataaaatctcatttgtaagccctcaaatgtgggccttgacttttagaattgagagctagaagtaaaaacaaattcacagcagtgtactaacacatttttgttaattcctaagatattttgctttagacctattaacatatttagagttatgttccttagttctgaggcaaatttgctctgtgaatagcactacactaggaagaaatcctaaaagagacattaacatgtaatttgtgtaaagttctttttatatttcacaagttatgaattttctatagtccttttaagtgttaaatggatttataaaaagcttttggtggttagcaaaatgggtggtttttgcctaatgtgaaatctgagattgataagttttatataaggagtgtttttttaaatcttgagattttttatgtaaaaaaattgtttcagttatttttgatatctaaaccaaaatagcattagaaaggagctattttaaaagtttaatttcttatcataatcttttaagagggagtgacaccagtgacttacgtttcgtttctatatagaattatatcagctatagagtatattgtatacttgtaatacccataactattaacacttaaataatacagtaatacagaggcctattgggaaaaaaaaaaaaaaaaaaactaaatcattcctttttcccctattgcttctgaagcattttttattttctttaactgtataaatttttgataactgatttgggtgtgctgtgtgagtatctgtgtgtacatacacatatgtgcttacgtgtctgttgagtgttagggaaggcttgttgtagagatggtgtagctcattataaactttagtttgttctcatttgatttatttcaatgaaagatttgagaatttgatcctcgtaagtctcttgcatgttctccatttgcccaggttgaccaagagggctaacttttttccctgcagaaagaaagtgaaagttgatatttgattgggtagttaattcatgcctacatgaaaaattacaggccagatgtggtggctcatgcctgtaatcccaacactttgggaggccaaggcggatgaatcacttgagtccaggagttcaagaccagcctaggcaacatggtgaaaccctgtccctacaaaaaatacaaaaaattagctgggctactcgggaggctgaggtaggagaatcacctgagcccaggaggtcaaggctgcagtgagccaagatcacgccactgcactctagcctggacaactggagtgagaccctatttcaaaaaaaacaacaaaaaagaaaaactaagtataattgagtgttatattgattacattaatcaagccatttgcttctttatacattaaattcttatttaaataatatttcaaagccatttggcttccttcttttaataggggtactaagacctcctagtgcagataaacttttaaaggttttttttgtttgtttgttttgttttgttttgttttgttttttgagagagagagagtcttgctctgttgcccaggttggagtgcaatggcacaatctcagctcactacaacctccgcctcccaacttcaagcaattcttcttcctcagcctcctgagcagctgggattccaggcatctgccaccaagcccggctaatttttaaatttttagtagagtcatggtttcacatgttggtcaggctggtcttgaactcctgacctcaggtgatctgtcctcctcagcctcccaaagtgctgggattacaagcgtgagccactgcacccggccaacttttaaagttttaatttaggtgattatatttttctgttttaatgctagggtttcttttattgcttataacaatctcatgaatatatgttttctagcagtcaccaagctacccacatttaccctggctaacaaatgggaacaaagagcaagatttgaatccaggtctcttgggcatcggagttgtgctctttctagtatcatttgccacctcttcatataattttttttttgggggagatggagttttgctcttgttacccaggccagggtgcagtggggcgatcttggctcgctgaaacctccgcctctcaggttcaagctatgctcgtgcttcagcctcccaagtagctgggattacaggtgctcgccaccacacctggctaattttttgtatttttactagagaccgggtttcatcatgttggccaggctggtctcgagctcctgacctcaggtgatccacctgccttggcctcccaaagtgctgggattacagacatgagccactgcgtctggccaataattttgacttaaatacatctaaaagaataaataaaattaaatgccacatatttatcattagtcatttattccaggattactctatgtgcgtggtgctacatgctagttcaaaattcaacgaattggtctagtcatcttcagtaaagactaagacagacttttctcctcaatgattctttttttcttttttaaattcagattcagcaaacatctttgggggcttactttgtgccagaccctaaaccaggtgttcctaatacgttacactgtgaggtggtttttattattaagattttaccaatgaggcatgaatgttagagaggtaataatataagcaatcatttaaaaacatacttgaacttagaatgtagtatagcatgaatagttacaataggctacaatcatatctaccttcactatcctatttctgttgaaaggcagtttaggcagtaaaataaacaaaggttgagatctggtttctttattttaacagctttatggagataaaatttacataccatacaatttactcatttgaagtatataattcagtgttttttagtgtaatcacagaattgtccaacaaccatgtcttctgatttttgaactgttactgattttttttcattactactaaccatacatttgaataagaaaacaggatcataattctaaaagggttatattcaaccctgttgttttcagatttagttttgttcaaccaaagtccaataactttcccttttcagttctactacaaaaagcttccttgacttccatgagaaatgtttgcttacaggaatgttaagctgattttcatgtgtgccattgacaaggagaagctttggaatgtgaaatccacttccgcataatgtaattatttaagtcttttgcaatagatgtactataaaagagaaatcaaagaatatatgcgattaatacttactaaatatatgtttttcaagttaaaaaacaaaaatcccttgataaccatttatagccattctgagtcctgattcactaaggagatcaaacctcaagatatggataggatgcagagaaaccaggtgctgatcccttctctcattggcttaagttcacattagaaagaatcgtattgttatgatggccatacttcccaaagcaatatgtagatacagtgctattcctatcaaactaccagtgtcatttttcacagaattagaaaaaaacgattctaaaattcatatggaacccaaaaaaagccaaatcaccaaagcaatcctaaacacaaagaataaagctggagatatcacattatgtgacttcaaactatactacaagactacagtaaccaaaacagcatggtactgatacaaaagcagacacacagaccactggaacaggacagagtccacaaaattacacacatacaaccacctgatctttgtgacaaagtcgacagtaacaaacaatggggaatggactccctattcaataaatggtgctggaataactggctagccttatgcagaagattgaaactggaccccgtcctttcaccatatacaaaaactaactcacgatggattaaaggacttaaaggtaagacctaaaacaataaaaactctgaagaaaacctaaaaaatactattctggatgttggccttggcaaagaatttatgactaagtccccaaaggcaattgcaacaaaaacaaaaattgacaagtgggacctaattaaactaaagagcttctgcacagcaaattaaactgtcaacagtaaacagacagcatacagaatgggagaaaatatttgcaaactatgcatctgacaaaggtctaatatctagaatctataaggaacttaaatcagcaagcaaaaaacaatcccattaagaaatgggcaaaggacatgaacaaacacttctcaaaagaagacatacatgcagccaacaaatatatgaaaaaatgctcagcatcactaatcattagagaaatgcaaatcaaaaagtcagtgagataccctctcacaccagaatggctattattaaaaagtcaaaaaacaccagatgctggcaaggttgcagagaaaagaaaacacttacgcactgctggtggggatgtaaattagttcagccactgtggaaagcagtgtgtagacttctcaaaaaagttaaaacagaactataattcaacccagcaatctctattgtgtatatacccaaaggaaaacaaatcattctacaaaaaagatgtgtacttgtatgttcattgcagcactattcacaatagcaaagacatgtaatcaaccaagatgcccgttgacagtggactggattttttttttaatatggtacatatacaccatggaatactatgcaaccatagaaaagaatatatcatgttttttgcagcaacatggatgcagctgcaggccattatcctaggcatagtaatacagaaacataaaaccaaataccacatgttctcacttataagtgggagctaaacactgaatacacatggatacaaagaagggaacaatagacacaggggcctgcttaataggggagagaaaggaggggagttgggttggaaggctccctattaggtactatactcattaccttgattgggggtccccaacccctgggccacggactgctgctgattcatggcctgttaggaaccgggtcgcacagcaccaggtgagcagtgggagagtgagcaaagcttcatctgtatttacagccactccccattgttgacattactgccttagctctgcctcttgtcagatcagcagcagcattagattctcgtaggagtgtgaaccctattgtgaactgtgaattcaagggatctaggttctgctatccttgtgagaatctaatgtccgatgatttgtcactgtcttccatcactcccagatgggaccgtctagttgcaggaaaagctcagggatcgcgctgattccacattatggtgagttgtataattatttcattatatattacagtgtaataataacagaaataaagtgcataacaaatgtgatgcacttgagttagcccgaaaccatccccctcccccgtccatggaaaaattgtcttccatgaaaccagtccttggtgccaaaatggttggggactgctgaccttggtgatgggatcattcatacatcaagccttagcaactagtttacccatgttacaaacctgcacatgtacaccctgaacctaaaataagtcactagaggatcataatgtacttaatatactatattatataaatatgtgttaaatatgctttatacacatacacactcagtatatatgaaaagctacttttgttttcaaagtgcttgtgcatctttaattcagtcgatggttgaaatacccccctggtaggaagggcatatgtcattatccccatttttggtgggtaaaatggtataacagatgcattaattcaagtcctgtggctgacattgctggaaagtactggctttcttccttatggcctgggcactttcttaagcctatacttaacatccatgctttggtttccatactttggcttacccgtgagatgtgatatctgtacaggggtataccagaccactaactgggatagcattaaagttatttgtagtttctctaacgcatcatttatctcatgctatgcctttgcccttgctatttcttcagtcaaaattgttttccctctccccaccacctcatgtcttacccttccttcatctctcagctcaaaaccacacctctgtgaagttctcccagttactacatgcagacttgggcttgccccgttctgtgcatctgctatactttgtgttaacttcatattacttcgtattaaggtgatagcaatgcccttactattaggttggtgcaacttttgccattaaaagtagtggcaaaaactgcaatcactttcacaccaacctaatatgttgtaattgtacacttactgcttatcatcctgcattagactgggatctccttgagggcaaggatctatattagatcatctctgcattcccctccatggtgcttggcacggggctggtagctttcttgaattcctagtgaatgtcaggaagggatggtggtgattacataatgtcattgctttgtcacctctaagccaaggacaacagtgaggagttgcctccttcaatagccaacccttagccaataacacaggcattggatgatgcgtggtagagaaaaagatttagagatgaaagattctgttagcactctcacttaattagctcagagaggtcatttaagctttttgagcctcaggtttcctcatactgttgggcagtagtaatgcctagaccactgggttattatgaaaataaatagagatcttgtataggaaagtagcttgcaaaccgaaaagcactgcaaacatgagaaataaagaagaaaaggtaatctggtaggaagaacatgtgctttggccttaggtgggattttaaatccagtctctgctactaattatttaatgtccacaacttccgtgagtctatttcttcccctctcaagggtaaataacaacactttggctgcttagagtaatgttgtgaagtttaaataggattcaggcaatgttccactgtgttccacctgtgttcagctttttccacccagagctttcagatattgtatgttcctacctctgcaccttcttttctatggcagaatcagtcctttgtactccagagaaagcaggcacctactctcaggccagggaaataaatagtgaggggagaccaccagaggaagagacaggcttccctggcatgtaatcccagccagccgggatgtgccttgggacggggcggaggcgcagcctcaatgtcatgtcacagcacattcctaggacagctgtttctgcggcagcttcttttaccatttcctttgaaactttttattgaagtggaagcctgagtgtacagatcacattttataaattcaacacacccatgtaaccagatcattcattcttgttgctgcctagtattctattttgtaaatataccacatcttttattctacagttgataggcatttggatagcttacaatttagagctaatacaaatggtgctgctatgagcattctcatacatgtttttggatgaatatatacccgtgtttcttacaggtatatacctagcagtggaattgcagggtcataaagtgtgcttatgctcaattttagtagataatactaaaacatttcccagaatttcccaacattgacacactcaccagaagtatttgcattccagttgctccagcatccctaccagcacttagtattatctgtcattttaattttaggaattctggtggattttataatttcatacatttggaaatagagccattctcttagcccccaaaagcttaaactaaacttttgtacattcattttcaggaatgtgctctctataaaactgggaagttgtatcagatgtaaagcccctagtacagtgcttgccacgtggaaggaaaatgacaagtgatagccactattactgtcaccattatcatcaccactaaatgccatctgtgttcttcaagggtgagagtagggcatggtggattacaaaggtgaataagacatattctctgcctacaaggagctcaagatctagtggaagagaccaagattagaaacagattttgtttttgtttttgagacgggagtcttgctctgtttcccaggctggagtgccatggcatgatctcgccgcactgcaacctccgccacccggtttcgagcaattcttcctgcctcagcctcctgagtagctgggattacaggcgcctggcaccaagccccgctaatttttgtatttttggtggagacggggtttcaccatgttggccaggctggtctcaaactcctgacctcaggtgatctgcccacctcggcctcccaaagtgctgggattatagacgtgagccaccatgcccggcctacaaacacattattattagacaacatgatagcaatttgaaggaaaaggtagtgcttgagctgggacttaataaggaaaagttcaatagaaagaaaaaagaaaaatgggctggagaaaacagcaagggcacaaaacttctggtggggggtggcagagtagacaatgtgctggaagagaggagctcatctgaggttggagtggtcatgtgctgtctgttattcagtgttaccattcttgcggggagtctggggccggagctggtgactgtgtgtgaagttacagtactctgtactctgttgctatgcccactgccactacctttgaacttttcttttcccactgggaaggtggacagcctcttctatttcctgggatcaaagcctgtcctgagtacaaggtgcttgaaaactaccattgacacttcaacagctgcaaaataacactggttgcaagaatccaacaatgtctctgctgtgtggtcctttaactgtttatttttatgctgggacctggcttagagtgttcattcttgcatagatccaggttgctttgtggtagcaattcaggttaataaaatgctcctctgcccaataccatctgtagatgttaataaatgttctcaaggaatttttaggatgctgaagatgatgatcaagatctcaaaatcatttcattgattaagtacctactatgtgtcaggcattggatacataggacaaagaaggaagtgggcatagtgcatatcttcattgaattggtaatccaatgggagatcagacaagtaaatacagtgtgataagggctgtgatgggcggaggtacagagtattgtgggaacacatggaagaaacacctcacccatactaggagatcagggaaggctttctggaaaaggctgcagaaacctgatagcctagtgaagaggagtagggaggaagtaatcaaggcagaggaaacaaagtgttggagaggctgaacacaagggagagaatggcttgttagagaaactggcagaagttactggcctggaacagagagagcctgaagagtttttaccaagggacccatggcaagatggaaaagggattaaaggaggtaaagactggcagcagaaagaccagttgtaataatcatggtgtaaaagacaaataaccaatgtcctcagtacactgactttcaaaattcacttatctctcaatctgccaagccagacatcctggcctccctagaaccagatacaattacagtcacatgtctcttcatggggataccttctgagaaatgtattgttaggcaatttcattgttgtgtaaatatcagagtgtacttacacaaagctagatggtgtgtgtgtgtatatgcatgtatgtatgtattcatatggaaaaccaaattcccaacatcattactgaatatcagtcctttcccctacttcaggagtccccgggccccaggctgcagactggtacctgtcgagagctgttaggaactgggcttcacggcagtaggtgagcggcgggagagtgagcattactgcctgagctccgttttgtgtcagatcagcagcagcattagattctcatagtagcatgaatcctatcatgaactgctcatgtgagggatctaggttgtgcacaccttgtgagaatctaatgcctgatgatccaaccaagatgaaacagtttcatcccaaaaccatctctccccccaacccccatttctggaaaaattgtcttctacaaaacttgtctgtggtgccaaaaaggttgaggaccgctgccctacttgatctgtaatgccagtgattagtgctctgtatcaggtttctatgtacttcattataaaatggagtctcactctgtcacccaggctggagtgcagtggtgtgatcttggctcactgcaacctcctcctcctgggttcaagcaatttttctgcctcagcctcccaagtagctgggattaaagcgtgaaccactatgcctggctaatttttgtatttttagtagagatggggtttcaccatattcgccaggctggtctcaaactccgcctcaaatgatccacccacctcggcctcccaaagtgctgggattataggcatgagccaccatctcgtatcttatgggaccaccatcatatatgcagtccattgttgaccaaaacaccattatgcagttcatgactctttttaaaaagtaaagaaaaatcctatttgaaagaactattacatgcaaaaaaatctattgttcctattactcatgcagatggccctttaaagccatggtccccaggtatgactgttacgttccttgccagaaataaacctgtgcaaggtgtactctctagtctctgtatgtgaagtaagagtcattctgtgcttgatgctgtgttttgtgcattctagataggaactgaagagctcaaaatgacatgaggttgagctgtttctcatttaggttagcttgctgtgattccagtagcttttcttcctgcttatccaagccattcatgaaagcaaaacccacacaagatacaggagctcagaataaaaggagttcaagtgggcgtgttatctcccacttcccctactaaggtacaaagttatttttctttttttcacttccttggtaattttttttttttttttttttttttacaaagactggttaccaggcatttcatacttaagccctgaagtctgggaatgtgatttctaacaattttatgtttggagttcttagacttgtgtttacctgcttacataagagataattttgcttacaaaactaactacagatgtgatcattgctgtagtattcattgtattttattaaaaaatattatgaacctactctgtgcagtactaggtatgtggaagggtttcggaaaaaaaaaaaaaaaaaaaaagacctggtccctgccttcagaaacttaatttaaaacagagcagaatcaaagtactaatgccacctttcttcattgtgtcatccaaggaagacacaagtaatcagtcacagcactgtttcctactgaaaccagaatcagcctcagaatcctcctcaacacagcattccagacaacccatgaatagataattcatcttcctggttgggtgtggtggctcacacctgtaatcccagcactttgggaggccaaggtgggcagatcacaaggtcaggagttcgagaccagcctggccaatatggtgaaaccctgtctctactaaaaatacaaaaattaggtgggtgtggtggtggatgcctgtagtcccagctactcgggaggctgaggcaggagaatcgcttgaaccaaggaggcagaggttgcagtgagctgagatcgcgccactgcactctagcctgggtgacagagtgaggctctgtctcaaaaataaataaataaataaaaatattaaaaattcatcttccatccttaatttaaaaaaatacatgcattcccaaaactcttgggtacttgccttgatttttattgcttggtcttttgctagtttttaaagaaataacatgatttctttctttaaaaaagacaaagcaatataaatatggaaacccaagaacctctcaagaaatgaaaatatggtcatgtggtttttcaagaagttgaaacattcagttcatgcacataattagagaagcccattcccattacttgccactagaaacactgtttttcttggttacttccaggatgattgtccttgtcctttattatttgtataaactagttccgtgctataaagctgtcagctgatagtgaataataaccacattttcaagtttcctggcaccggggcttcattcatggctgctcgggtcacctgctttggtagagatcgtatgtcttcctggtgctgacttattcagcatcaccatcattgattatttcatggccacctgagtcttgagctgtcttctcaatccacatgctttccataggactgcatcaaaggccagagtttcagctatatatattgataaatcccaagtgtgtatagtaagactcctcctaaacgctagacccttagtttcaactgttcatggacacttccaccagagtgattggagctaacgtaaacagctaacaaacacttgtggccagaggatgtgctaagagcgttacaatcattacttaatttaacctttccaacaacccttagaagttttcatccctattatacagatgggaaatacacaaggcttaaggaatcaaccattagtaagtgttagaactaagtctggaacataagactatccaaagtttaacggtatttaatggtatacacagacctttcaattttggcttatacaaaataagagtcatcccactccttgacctccaaatttcagtcttaacctttaatgagtccacaacaaatgccatcctgctgtcataccctccttcaaggtccactaagtaaccactatggacttggtgcagtctgtcataatttcttacctagaatgcaattcttactcattctttccctcttcccttgcactaggagagaaaagctgtatattccccttttagtttattttctactacatttatattggataaaaagataggacctgaatgagaaaactttagttaggagcaggcatagggtttttctcatttactcttttcatttgcatctctagaataatgtcttttgtcttcttgttttctaggaatgtttacccttgcggaagttgcatcacttaatgacattcagccaacttaccgaatcctgaaaccatggtgggatgtgtttatggattacctagctgttgttatgttaatggtagccatctttgcaggaaccatgcaacttaccaaagatcaggtggtctgtttgccagtattgccatctcctgtaaattcaaaggcacatacaccaccaggaaatgccgaggtcaccaccaacatcccaaagatggaagcagccaccaaccaagaccaagatgggcggacaacaaacgacatttcctttgggacatctgctgtgacacctgacatacctctcagagccacatatcctcgcacagatttcgcacttccaaatcaggaggcaaagaaagagaagaaagatccaacaggtcgaaaaacaaacttggattttcagcaatatgtatttattaatcaaatgtgttaccatctggcccttccgtggtattctaagtactttccatacctagctcttatacatactattattctcatggtcagtagcaacttttggttcaaatatcccaaaacatgctcaaaagtagaacattttgtttcaatattaggaaagtgctttgaatccccttggacgacaaaagcgttgtctgagacagcatgcgaagactcagaggaaaacaagcagagaataacaggtgcccagactctaccaaagcatgtttctaccagcagtgatgaagggagccccagtgccagtacaccaatgatcaataaaactggctttaaattttcagctgagaagcctgtgattgaagttcccagcatgacaatcctggataaaaaggatggagagcaggccaaagccctgtttgagaaagtgaggaagttccgtgcccatgtggaagatagtgacttgatctataaactctatgtggtccaaacagttatcaaaacagccaagttcatttttattctctgctatacagcgaactttgtcaacgcaatcagctttgaacacgtctgcaagcccaaagttgagcatctgattggttatgaggtatttgagtgcacccacaatatggcttacatgttgaaaaagcttctcatcagttacatatccattatttgtgtttatggctttatctgcctctacactctcttctggttattcaggatacctttgaaggaatattctttcgaaaaagtcagagaagagagcagttttagtgacattccagatgtcaaaaacgattttgcgttccttcttcacatggtagaccagtatgaccagctatattccaagcgttttggtgtgttcttgtcagaagttagtgaaaataaacttagggaaattagtttgaaccatgagtggacatttgaaaaactcaggcagcacatttcacgcaacgcccaggacaagcaggagttgcatctgttcatgctgtcgggggtgcccgatgctgtctttgacctcacagacctggatgtgctaaagcttgaactaattccagaagctaaaattcctgctaagatttctcaaatgactaacctccaagagctccacctctgccactgccctgcaaaagttgaacagactgcttttagctttcttcgcgatcacttgagatgccttcacgtgaagttcactgatgtggctgaaattcctgcctgggtgtatttgctcaaaaaccttcgagagttgtacttaataggcaatttgaactctgaaaacaataagatgataggacttgaatctctccgagagttgcggcaccttaagattctccacgtgaagagcaatttgaccaaagttccctccaacattacagatgtggctccacatcttacaaagttagtcattcataatgacggcactaaactcttggtactgaacagccttaagaaaatgatgaatgtcgctgagctggaactccagaactgtgagctagagagaatcccacatgctattttcagcctctctaatttacaggaactggatttaaagtccaataacattcgcacaattgaggaaatcatcagtttccagcatttaaaacgactgacttgtttaaaattatggcataacaaaattgttactattcctccctctattacccatgtcaaaaacttggagtcactttatttctctaacaacaagctcgaatccttaccagtggcagtatttagtttacagaaactcagatgcttagatgtgagctacaacaacatttcaatgattccaatagaaataggattgcttcagaacctgcagcatttgcatatcactgggaacaaagtggacattctgccaaaacaattgtttaaatgcataaagttgaggactttgaatctgggacagaactgcatcacctcactcccagagaaagttggtcagctctcccagctcactcagctggagctgaaggggaactgcttggaccgcctgccagcccagctgggccagtgtcggatgctcaagaaaagcgggcttgttgtggaagatcacctttttgataccctgccactcgaagtcaaagaggcattgaatcaagacataaatattccctttgcaaatgggatttaaactaagataatatatgcacagtgatgtgcaggaacaacttcctagattgcaagtgctcacgtacaagttattacaagataatgcattttaggagtagatacatcttttaaaataaaacagagaggatgcatagaaggctgatagaagacataactgaatgttcaatgtttgtagggttttaagtcattcatttccaaatcatttttttttttcttttggggaaagggaaggaaaaattataatcactaatcttggttctttttaaattgtttgtaacttggatgctgccgctactgaatgtttacaaattgcttgcctgctaaagtaaatgattaaattgacattttcttactatatcaccttttttgaggggtcttaatttactttgcttaattggtgcaatattgctttaactccgttcactaaagacaaacacatcaagtccaaacttgtaaatttagatttgctgaaatactgatttatttcctgttttaatttaaagtgcctcaagtaagcacctctcacaacagttgactggtactgctgctcctgagcacctcgtgtcatagattttatactcttacagacttggaatgcagtagaggtatgtggatttttaggggttttgtttttttaagaataagtaacaagaaataacacatttcttaataatagcttttttgacatagtttggagttctgattatatggtacatttttctaccagtaatatagggttgccaataaatagaaaatgttttctaaaaataaattttattacaacaaaataaaaattttaatgacttattaacacaacctccagtatcaccaccatttggaagataacacagaatcacaagtatcatttaatttcttgcccttttcagtgttgttctggtgttggtgggaaaataataggaaatgtagttcattgggtagggaaactcttacctttccctatcttaat

SEQ ID NO: 165 - DNA, 28075 bp, Homo sapiens
agagggaaacccagaggaactggttgtaaagaggaatgggccccagctgaccccctgaacccaggtggtgacatgtgcacggtggtgcctgctgaaggtgggcaagggagctgagcagggaccgggggctactgtacctccttttcacctcctcccgcatctggagcccctcctcctccacatgtgcgaatccaggagccacagaaggtggggcgcagtgggacatgggtaggaggaggaagaatatggggagattctagtccctcccacttagagatgcggtcgccatggtgactgaggaccagtgaggcgggatggggttgagaatgggggtgggggtgtggcaggggctgaggcactgagagaccggaaagcctggcattccagagggagggaaacgcagcggcatccccaggctccaggtaagggagcgggggagctgacagttctgaagggagggggcggggccattgtctggtgctggctctgccctaaagagggggctgacagaggggtcgggctattgtgtgtgatactcagcgcagccttccagagctagtcagactggaggaggggacctgggaagctctgggtaaggggttaggagggactgagctggtgggtggcaaaaaggctgggagacagtggggatgggaagaggtggagggacacagggggcgtagaggcttggggacgtccctagtgcctatacacgctaggcactcaatacatataagttgacttgacttgcctgtgaccataacaagagggcagatgagggccagggcaggtggagctaaggcagggaagtcaggaggcaatgttccccagaactggactcttctgtgggctgcccctgaagctgaaagggaggaggtgggggaaactggacctgccagatcactcgtgaagccaggagttgcttctctcctggctccaggagctgctcctttagtgcagcatccgtgttctgcaggggctcagaagagactgagcgtctggggctggttgaagctcagaggtagcatagagtcggggcgggaagcaacctctccatctcccctcccacctccacatctagacctttcctctgcacaatagaacctggcaggaaggggctacatcgcatgctgtgtaagggttgcaggggaggagctggactctggcagggcagagggtgcactcagtgttgttgtcatggcaggacccagggctgggctccagggcttgtggagaaatgggctgggggaaaccccagattggagctgtgaaaatgacacggcccctgtgggcaggtccctgaacatctgaccccttcccactgccaccccacctgacctgctgcctgacaccattcccagccaaggtacttctgctccttggccttggtttcctcatttgtacggttgtcaggaagggtatgtctgagtaccctgtcagccctgagcttctttgatgctgtgtgcaggacctgctatattatttgtggggcccagtgcaaaataaaaatgtagagccccttgtttaagtattatgaggactttcaacagagcaacagcagagcattaaaccaagtgtggcccttctgagcacagggccctgtgtggctgcacaggtctcgtgcccacgaagccagcactggctggggccctgccagctgaagcaggggagatggcagtggggcttggggtctgaccccagagactggtgtgaggggtgcactgctgggggcagggtgcccttcctattgctgtttttgaccaggaggcccttgcagaggcagggggtggtacctcacagccttccttcaagaaggtttctgttccctctgaaacgctttattgacacaaataagcttgcccataagggccacgcttggggctgggcacagtgtctcacgcctgtaatcctagcagttttggagtctgagtcaggcggatcacttgaggtcaggagtttgagagcagcctagccagcatggtgaaaccccatctctactaaaaatacaaaaaaaattagccgggcttggtggcacatgcctgtagtctcagctacctgggaggctgaggcaggagaatggcttgaacccgggaggtggaggttgcagtgagccgagatcgcaccaccacactccagcctaggcaacaacagagcaacacttcgtctcaaaaaaaaaaaaaaaaaaaaaaaaaagcccactcttggtttaatgctgtgcggttgccctgttgaaagtcctcagaaatcaccccagagatctgatttcttagcctagagtagataaagctcactaccctcccagcccacccttgccttctctatccaagtggctcagaactgtggactggggcaggagggaggactgagggactaggactctgtagagtctttgtagctaagagatttgctattgaatgaggcagatctgaatttaacttggcttctagctgtgtaacctcccttcttgatctgtaaaatgggattatggcagtacctagctgctaaaattgttgggagggctaaagcctgatagtgtgaactattcatattggctagaggggctggggaagaggacgtccggagttgggagaattctggatgtctggaggaagaactgggggcagggcatggagtctatgacttccagaaaggtgggaataggacatcaggctgggagtgtagggctggaactcccccagcctccccgtatcagaactcttcccagtgacccaaatgagccaatctgtttaagcagagaggcccaggggcagactggcttcccaaatctgagctgggggttggggagacacagaaggtagggtctggataaatgggagtttctcttgattctaagaaactggaagggacctggcaaccagcctctgggagagtctgggggagtcctaggcaagtcttgacagaaacgattgtcaggcaggatatgtctgagaccaacccccggggaaactgagagagatgaaagaaggctgagtacctcagatgaggaattataaggagtagcctgagctgtaacatcccccatgttggctggtgctgtagcaggagggatggaagttacactacaggaaggacttcctgccagggaggaatgtgcatgtcagatggaagtggattatttattagagttggattagccctgggatgtctgtgctctttaacctgcagtcagctgaccatgtcgagtgggcaggaacctacccactttgtaggccacagagttcttggcgctggatgcctcattaaccccgcgttatgaggctccccctggagcctttagggaggggtgagcagccacctttgggggttgggtgcctccaaagtgtggtccagtgagcacgagttcagatgggaaatgttctgggctttctactggcctgatttctgggcttcctattggcctgatgtcaaagagtgatggagattagactgcaagggggacttcctcagcaaaatcatggataagagcctaatacaattattttattttatttttttaaagactgtggcccagctgagagtgggaggtttaaaggttagaccactgcagggacttcccagtaggtaggagtagagagaccccaccttgtgggtaagtgaaaagaagaatatgtcatgtcccctatctgggaaatcttaagcaagagaagaaaccactgctaggctggttatactggctgtgacatgatggagaggcaggggaatcgctgaaatgacctagaagggcctcttaaactttctggttggaccgagcagaggagggagagagaggtgtgtctcttgtgaggtgggtgaacgtctttttattccctcccaatccaccaacttccgcccaagccaggatctgtcacaactcgagaggtggaaattccggtttccctggcctagagctcccagtgctggctttggcatgatgggcacctggagggccgcactcccgttccagccaggctgagccttctgtcccctgcctctggggcctgggaaccccccttcttctttctcctgaatggcacccccgccctagaatccagacaccgagtttcccactgtggctggttcaagggtatgtgaggtgagatgggtggcttggggtgggtggtcttggggaagattatgtagaggcccagggaggcagacacaggagcaagagacaagggggccggggagctgcagaggctgggagccggccagccacccctgcccaggcagctccccgggaaatgctgataaccaacctggtgggatggaccctcattgcctccctggaagtatcaggccaggcaggcctgagcctcaaagaccctgaacccagctggggctgggggagaggttagagcaggcagactcaaacccagtctgcctacctgggtcagagctgagtatgaggcacaggtgtcaacagatctgaaagtgacaggagagtaaggtctgaggaatttatattttgggtacaggaacctgctccccaaaatgttccctgcccagagccaggcaacggtttgggcttgggctatgagaagagggaaggcaaaggaggaaagacaggaaagacttcctgagagtaaggcaaaaaaaggcaaaccagagctgttggtgagaagacaacagaagaagcaggataggggagacctgggctcctacccataggggacagtgaggtgacaggctgaggcctggaaggatgatgaaagtgagaccgtcttagggcccttccagatagggaaccttctctgccccaatgccccacccctgccaccaatacacacgcttctgctgcctggggctctcctattggtcctcggggggatgtggtaagaactgctcacccagaaagtgcccgggtgcctgtttccccagagctccctggtgacagtctgtggctgagcatggccctcccagccctgggcctggacccctggagcctcctgggccttttcctcttccaactgcttcagctgctgctgccgacgacgaccgcggggggaggcgggcaggggcccatgcccagggtcagatactatgcaggtaagtgtccgacagcaggaagtgtggggatagcaatagagagctggaggtgggtggaggaaggagagaggaacagaggaggggaggaaatggatatggagaaacagggacacagagagagatgccagggagaaacagaggatctcggagaaagagagacacagccagaaacagaagtccaaaaggaaagaaaagccactggagagcagattgaggaaaacaggtggccacggggccaggggcacgcttcttccagttctccatgttggtaatttttctttccttccttaaatatcactgtcaccaagctgggcacctcaaactcctaactgcttcacactcccaggtaccccaaagtcaaggcccatgctagaagaccatatgtggacccggtgacccggagctcgccaggcccatgccaaccacatagatcatgctggaccataccatgtccaggaccatgggatggctggttggagaatgggccctggaacccacacacaagcacagcttggctggtttcttactgagactgtggaggctgctggccccctcacctccagggagaagactcaggaaaggatgtagacactgtaggagttgtaggtgactgggcatggctgtgtctttagcatctttctggggcaattggtaaaagaaatgtatattgctcattgatgcagagacctcctctgtgttggatgctgggcgcacaaacacggataagcctcagcccctgccctcaaggtgttcacagtcacaagggggaagacatgagcaatcagaccatcaatacagggtgatctgttcagcaactgaggggtttatggcagctctgggggaggcctggcctccaggagatgctcctccctgaggctggcccttccatcccgcagccacaccagattccccaacttctcccctctgtactgtgtaagattccctgagcctgcaaaggtatcaattagctagtcagctttctaactaatgcaacagtgcaagtgctaatgagagaggatctgaggagctccttcctccttgccgatgtgccagtgggacaggaaaatacacccccacccaccccaccatgccaaggtcatggagaggacctaggtgagcctcccacacctggctcaccatccctgcccaggggacatccagccatgcccacatggatctttgaagaaaaatgcttcctctctgttcgtggtgactctactggtgggaatttcctttaacagaagaggaagaaagcaggggtggttggggggatggcgagagggactctgacatacgccctcctgtctgcatatagctttgctgcttgtggctgccaacactttcctgtttgtctgtctgcctgctgctcctcatcctagtgaggaccaaggcgtcctccccgacggtagccctccctgtcccaggcctggaagagcatccactgtgcctcactttatttcccgtccccattaccctgcctctggctgcctctcctctctactgcgggctcagcacacaacgctcttgtgttggggtggggtgaagggaagaactgctggtggaggagagtgcatctagctgccaaggcctggggagcacactcaggcaacccttccccttcccccacttttatctcaggagtcagctgcctgcccaccaagtcctcatcactctctctgtcttactcctccaacaggggatgaacgtagggcacttagcttcttccaccagaagggcctccaggattttgacactctgctcctgagtggtgatggaaatactctctacgtgggggctcgagaagccattctggccttggatatccaggatccaggggtccccaggctaaagaacatggtgaggagtccagggataaagagtgtgggctgggagtgaagagggggccggcagctaccctgggcttggctgcctgtgcatgaataacttagttgctgttatctgtaatcagcagttctctttatatgtatatcgtgacaatataacagacaggaaatgtcgtggcctcacttttttttttttttttgagatggagtcttgctccgttgcccaggctggagtacagtggcacgatcttggctcactgcaacctccgcctcccaggttcaagcaattctcctgcctcagcctcccaagtagctggcactagcatgcaccaccatgccaggctaattttaatagagacgagattttaccatgttggccaggctggtctcaaactcctgacctcaggtgatccgcctgcctcagcctcccaaagagttgggattacaggcgtgagccaccgcacccggcctgtgacttcactcttcactggtattgtgaatagtgattgaataatattaattgcaaaaatggctgatatggaaatcattgacatatgagataaacactgactcaaattatatcaataatttgatatctacccactagtagaaatcactgatgcttctgtgtctttttttttttgagatggagtctcactctgttgtccaggctggagtgcaatggcgtgatcttggctcactgtaacctctgcctcctgggttcaagcaattctgcctcagtctcctgagtagctgggattacaggcgcccgccactaggcatggctgatttttctgtttttagtagagacggggtttcaccatgttggtcagcctggtctcgaactcccgacctcaggtgatccatccgcctcaggctttctaagtgctgggattacaggtgtgagccactgtgcctggctgcttctgtcttagtcgccctattaatgggaacaatgtgaggaaggaaggaagaaagggagagaaggcactagcaatattagcaatcacctccatggttcatgtatcctgatgtgtagtctgctgaccacctgcacatatgagatgctggttaaaaatgcagattctctaaggcgtgacccaggaaccaacttgttaaacaatttccccaggaaatgtgcggtttgacaactgctgccatatataccattcatcgtgttaggtgttttgtatatgccacctggttgtatctgccagtagcctatgaaattgaccaagatctctcagtcaggaaatagccaagtctagatttaaacttgggtctgtctgattccttaggctgtgttcaactatggagctatgtctgataccagtattattcaagtaatagccatggtcacaaactgatgttattactgcccatcagcatgtcactaaccaccatgtctgctggttatttcacatcagagcagagaagggaggcaggtcacagctagaactgaggaccttatttcttttcatctcgccctcccaactccccactttcagataccgtggccagccagtgacagaaaaaagagtgaatgtgcctttaagaagaagagcaatgaggtaagtggaggtgggggagtaggggtagagtgggtagagagctctggcatccctagaccatccctggatgacctcaggttgggcggcagtggagggcacttgtttgcacggttatctcctggattatgttctacagaggcgtacagggactgccccagcattacctagcctttctcctcagtgagggggcagcctctgggggtccagcaatttgagtcaggtggcctggagacctaaattctctgtctccctcagacacagtgtttcaacttcatccgtgtcctggtttcttacaatgtcacccatctctacacctgcggcaccttcgccttcagccctgcttgtaccttcattgtgagttctctggtgcccagcgctcaggcccccaagcatcccttctcacatctacccacgactttcctctgtagctctggaaaactctggccttccagatgcaggaccctcatgaacttcctggccccagaccaatttccctctatgtccctttcccttccttcctcaagcccctcatttcccagatgtgagaccttggcgttctggccccccagcctctctccccatttaggaacttcaagattcctacctgttgcccatctcggaggacaaggtcatggagggaaaaggccaaagcccctttgaccccgctcacaagcatacggctgtcttggtgggtgagtatcaggtttcccacttcatcccaacatctactttctccagtcacgctgtgaaatatggaatattacagagttttccaaaaggcaggggaaactgggtgtggtgatgcgtgcatatggtcccagttatttggaagctgaagttgaaggatgcttgagtttaggggtttgagtctagcctgggcaacacagcgagatcgtctcaaaaaaaaaaaaaaaaagcctcagtgcctcatgcctgtaatcctagcagtctagcagtttgggaggctgaggtgggtggatcatgtgaccccaggagtctgagaccagcctggtaaacatggtgaaaccccatctctactaaaaatacaaaaattatccaggcgtggtagggcgcacctatggtcccagctactcgggaggctgagtcacaagaattgcttgaacccaggaggtggaggttgcagtgagccaagatcgcgccactgcactccagcctgcgcaacaaagcaagactctgtctcaaaacaaaacaaaacagaaaatgcagaggacagagagagagagggaagccagaagcctcagaacacaagatcagagggagaattaagcaccccaaccaccagctcctgctgaaattgccacaaaaagtggtggagaaagatgcatgtggagagacagaggcacgagggcccgggaagggtattgggtagagaagaggcctgagactgagccactgttcaacaattgtgtgaacacttcctctggtgtactgggcactgtgctgggtagtataggagttataaacaagaaatcaggctgggtgcagtggctcacacctgaaatctcagcactttaggaggctgaggcgggtggatcacttgagcccaggagtttgagaccagcttgggcaatagtatagtgagacctcgtctctactaaaaacaaaacaaaacaaaaacaacaacaacaaaattagccggacaagcgcctgtgatcccagctacttgggaggctgaggtgggaggatcgcttgagatggtcaaggctacggtgagttgtgatggcaccactgcactccagcctggatgtgagcaagaccctgtcttgaaaaaaaaaaaaaaaaaaagggagagagaaaccatgtatcaatgcactactggacaccaaccattacagacttcccacctgccttcctggaggagatggccttcggcttttcagcaggaccttgaaaagataggtagacagatggcagggaaggtgttccagggagagaagggtaggacccaaggtgtggaagtggaaaacacagtcaccttccaggatcagtaagtgattctacttggcaagtggttcagctaggtatgtgacgaagtagccacagaaaggctggaaaagtgcccaaacacggagggccacacaggatggccatttcctgtggagagaggaagctaagaggggtgcttagtgaggagggggagctggcctttgaggctccccaggaaggtgcagaactgatgcagggcccccgagactgatatggatgccagccccagtcagaggcaggtctgtggagggcagaggaaccctccaccccatcagttctctcttctcctctcctccaccctagatgggatgctctattctggtactatgaacaacttcctgggcagtgagcccatcctgatgcgcacactgggatcccagcctgtcctcaagaccgacaacttcctccgctggctgcatcgtaaggacctgacccccgctggcctcctttcctgagtcctggtgaccttgctaattcactcaactttcatttgcggaaggtacaatgtgtccattactgttaggcgcagggggtatatggcagggaagaaggcaaagctccggttctcttgaagctttcgtcttatgtaaacacattaaagaagtaccagtcatccccaccccacatcgctacccctcgacaagctgtgggacccgaggaagcctgtgtgtcctggcctccagggccaaaccaacggttttcactcaggcaaacccagggcatgcaggggctcagtccctaagcccatctgcccctcccccgcagatgacgcctcctttgtggcagccatcccttcgacccaggtcgtctacttcttcttcgaggagacagccagcgagtttgacttctttgagaggctccacacatcgcgggtggctagagtctgcaaggtccgcggcctgggcggggggcggggctaactggaggagaaccaatagggagatggcaggggcaggactgagtggtgggcccccagtgagagcgggggagcggggcggggaacaagcgggcctggcggggtggggcgggggacagcggggctgggcgggtggggcgggggacaagcgtggctgagggggcggggtggggacacgcggggctggcggggactggggggacacgccgagctgcggggggcggggaggacacgcggggctggggggtcggggcgcccggggcgccccctgactccccctgtgcccccagaatgacgtgggcggcgaaaagctgctgcagaagaagtggaccaccttcctgaaggcccagctgctctgcacccagccggggcagctgcccttcaacgtcatccgccacgcggtcctgctccccgccgattctcccacagctccccacatctacgcagtcttcacctcccagtggtgagcagcagggctggaccatgggggctggacacgggacttgacgccagtgaggccccagctcgtgagcggaggcaggaattgacatgagccagcacctactcagcactttcacataggaaggcattaaatcgtcaccacctctcaggaatttgactcatgccctttttgtaaatgggaaaaataagacgcagagaggttctaactagtttatattctgcctagttccaaaagggataggaagcattttacaaaaggcaaatattaaaatcgataaaatagatacagaaatgggaataaaaggagaatatgagaagccaagggtaaggccaacacactacaaatgcttgtcataagatgtaggatagtccctggatgccagccacaaatttagctctgcatttcctaatggccagggcaaacagggaaacgctatccgtatcagaagataaaaataaagtcggccgggtgcggtggctcatgcctgtaatcccagcactttgggaggccgaggtgggcagatcacgaggtcaggagatcaagaccatcctggccaatatggtgaaaccccgtctctactaaaaacacaaaaattagctaggtgtggtggcgcatgcctgtagtcccagctactcgtgagcctggggcaggaggatcccatgaacccgggaggcggaggttgcagtgagccaagatcgcaccactgcacgccagcctggcaacacagtgagactccgtctcaaaaaaaataaataaaaataaagtcattgcttgaaggttgagaaaggttaaccaatttgtccaaggtccccgagtcatggtctggccccacagtgtttaggtacctgctgacaatgtgtcaggtaccaaaggtatttggggtaagtgggatctggtatccacaggatccagaattgagagcctggtgtatacagtagtcagcttcaagagagcagagaaacagacctcctgtctccacagaccagggttgaggaataataacagtctggtagtcaggcactggtcggttctctgaggaccagggatccaagagactcaaaggaagaggggtttgtgtggagccaggctagagctggttacactgtccctccaatgggtgcagcccagtgtaggcaggacaggcaggggccaccccagggcctgagccccaattaattctcattaaggataatcagacttcagatcccaagatgggcctagagccaggccctgggccagagtcagggaattccatggggctcccttggcccttatcaacacagtgaggggaaggagtggtagctggaggctggcccagctctccacactcttgcctcctgggttttctcactgagggccagcgctggagagagagctgctggtgtggcagagaccacagacaatgttccctctggctgtctccaggcaggttggcgggaccaggagctctgcggtttgtgccttctctctcttggacattgaacgtgtctttaaggggaaatacaaagagttgaacaaagaaacttcacgctggactacttataggggccctgagaccaacccccggccaggcagtgtgagtactaccccccacactgagcacagtctacacatacataatgtgcatgaaaaaacacctatcatggcatagtaaatgcccaataaatgttagtgctctccaccccaccaatctcgcctgctcagacgtacacctggtatagctgcctatattccacatgtgcctagcacccttttatacacggagcagttgctggagccatctcccttcaccaaggctaagtgtacaccaaatatctgggtatatcactatggaaacaagggaacatgcgctgtgtgccaaggactgtcttgggcattgccacctgcatttatttaactttttaaaaaaatcagaggccagggccgggtgtggtggctcacacctgtaatcccaacacttggggaggccgaggcaggtggatcacttgaggtcaggagtttgagaacagcctggctaacatggtgaaacctcatctctactaaaaatacaaaaattagccaggcatggtggcacgcgactgtaatttcagctactgggaggctgaggcaggagaatcgcttgaacccgggaggcagaggttgcagtgagccaagattgcgccactgcactccagcctgggtgaaagagtgagactcagtctcaaaaaaaaaaaaaaaaaaaaaaaaaaaaatcagaggctgggcatggtggctcatgcctgtaatcccagccatttgggagactgagacaggaggttcacttgaggccaggagtttgagaccagcctgggcaacattgtaagactctgtctctaccaaaaaaaatgagctgggcctggtggcatgtgcctgtaatcagctactcaagaggctgaggtgggaggatcacttgagcctgggagttcaaggctgcagtaagctatgatcacgagaatgcactccagcctgggtgaccagagcaagatgctgtctctaaagaagtttttaaatgaaaaaaaaaaaaaaaaaatcacagcctgggcaacatggtgaggcaacattttctcctctacaaaaagagaaaaaatcagagctattatatgtacatgatttgaagaatcaaatagatctaaaatgaaatagatctatagggttgactataaaaagcagtcctatttcccatcctccacctctccccaaccattttcaactcttttagctgattcttttcaaatttatctcaaaatttctaaataacatgatttattgctacttcgtgacgtttcagtttcagacagtatctgttgaattcccactgtagaaagtgaggatttaactatgttccccaacccccacctccacccagtggtgtgctagagctgacttgcagcagccagcaagaactgtttttgcccatctttttccaaatttgtgtttagtgatactacactggtagcttgaaattagccatggtggaagtatacatcacggaaatcagcaaacaatgcaaatcggctttctaaccctctcccgcaaaagctgacttggaccaacatacagtaactgcacccacccccaatctcctaacgtagttttctagtaattttggttagatcaatatttatattatgactcttcttattcacagcctagccaggcagtaagccatgattacttttcctttttgcatagttttgttttccctggggttagtaattatcttgacttttctgcttgctttgttttctaagctttttatttatttttatttttattttttttgaaacagagtctcactctgtcgcccaagctggagtgcaatggcgtgatctcggctcgctgcaacctcggcctcctgggttcaagcgattctcctgccttagcctcccgagtagctgggattacaggtgtgcgccaccacacccagctaatttttgtaattttagtagagatggggtttcaccatgttggccagactggtctctaactcctgacctcagttgatcctcctaccttgacctcccaaagcgctaggattacaggcatgaggcactgtgcctggtctaagctcttatctttaatccaaccccaaactcttcttaaattatctgaatctcttctgaagacagacctattagcttttctaacagtttcatcttcctggagagcctttctgactgctccagtctagactagtgccgtctactcccggagcacagatgccatcctggaattcccctgcctcatcattctggggattccctttgcctctttcctgtgacagatctcttgtttcttgtgtcccatggcttcctcttttttttttcttttttcttttcaactatttcattttggtggaggttatcctttgtagattcctggaaaaggatacatggcaggtaaaacattttaagatcttgagtgtctgaaaatgtattctactttcctatttgatagttcagctaggtatacgtaattctagaatagaaatacgtttccttcaaactttgaaggccttgctctattatcttctagcttccagaggtactgttgagaagcccaaagttattctgatccctagccctctgaatgtaacctggttttatttcactgaaatcttttttttttgttttttttaatactgatccttgtggagcagggctaccttataggcagtgtacctcactgccctcactggaatcttatagtgctttttctttgtcctggtgttctgaaatttcatggtgttgtgctttgatggaacactactcatttattgtgctgggtactcaatgggccacttcagcctggaaattagttatcttagttctttcagttctgagttttcttgaactatatcttcctatcttctttttttttttttttttgagatggagtcttgctgtgtcccccaggctatagtgcaatggctctatcttggcttgctacaacctccacctcccaggttcaagcacttctcctgcctcagcttcccgagtagctgggactacaggtgccctccaccatgcccagttaatttttgtatttttagtagagacagggtttcaccatgttgcccaggctggtctcaaactcctgacctcaggtgatctgtctgccttggcttctcaaagtgctgggattacaggtgtaagccactgtgctcggtctttttttggtatttttagtagaaactaggtttcaccatgttgcccaggctggtcttgaactcctgagctcaagcaatacacctgctttggcctcctaaagtgctgggattacaggtgtgacccactgtgcccggccctatcttcttttcattcaacaaatattttttgaggacacatgctactattctgggcagggaatatagaagtgagcaaaacagatgaaagtcccttgcctcatggggcttacattccaatggggtgttttctcacttttttctggacctcctagactagtcttctcactttttttaagctttcctactgtccaagtctttggttgtgttctatttttctggaagagtgtctcaactttgtcttccaatctttctgtcaggtttttcatttctgtgttcagagacagtgaaagaaaaaagaaagaaggccaggtgcagtggctgacacctgtaatctcagcactttgggaggctgagacaggtggatcacctgaggtgaggagttccagaccagcctggccaacatggtgaaaccccgtctctactaaaaatacaaaaatcagccaggcgtggtggcacacacctgtagtcccagctactccggaggctgaggcagaagaatctcttgaacccaggaggtggaggttgcagtgagccaagatggtgccactgcactccagcctggatgacagagcaagacttcatctcaaaaaaaaaaagaaaggaaagaaagaaaaagatttttcgtttctgccaaacagtctcgacctcctgggctcaagtgatcctcctacctcagcctcctgagtaactagaactacaagcacccaccaccacacccagttaattttttaatattttgtagaggcagggtctcaaactcatgggttcaagcaatcctcccacctcagcctttcaaagtgctgggattacaggtgtaagccaccatgcctcacctgggattgtatagattaaaagaaatttaagaccaggtacagtggctcgagcctgcaatcccagcactttgggaggctgaggtggaaggattgtttgagcccaggagtttgagagcagcctgggcaatatagtaagacccccatctctacaaaatatttaaaaattagctgggtgttgtgccacgtgcctgtagtcctagctacttggaagggtgaagtaggaggatcacttgagcccgggaggtcgaggctgcaccccactgtactccagcctgggcaacagagtgagaccctgtctcaaaaaaaaaaaaaaaaaaaagaaagaaaagaaaagaaaaagaaaaatatttacataatccctttccatcttctatttttctcgtgcatttttttgcttgtcagagtcttccacagcctggatcttgatgattgcatctctgtagtgtagtttaagtatttcctgtaaattgttcagtagttggatctagagacttaatcggattcagatttggtttggaggaggggcaagattacttcatcgtggttgtgtgctctttgttctggatgcacgtaatgcctggcagccctctttgtgtgaaggaaagactcttctttggcagcattcgcttcctgtttcatggatgcactgttttcacatatctctcataggatagtaatgatggatttctgtgaagttttcttctttctgattcatttctgtttcctcttagtttttttgtttgtttgttttttgttttttttgagatgaagtctcactctgttgcccaggctggagtgcaatggcgcgatcttagctcactgcaacctccacctctcggctttaggcagttctcctgcctcagactcctgagtagctgggattacaggcgtgcgccgccacagcacccagctaatttttgtatttttagtagagatgggatttcaccatgttggccaggctgatcttgaactcctgacctcaggtgatccacccgcctcggcctcccaaagtgctgggattacaggcatgagccactgcgcccagcttactttttttttgtttgagacagagtcttgttctgttgcccaggctggggtgcagtggcacgatctcggctcactgcaacctccacctccctggttcaagcgattctcctgcctcagcctcctgagtagctgggattataggcgcccaccaccacgcccagctaatttttttctatttttagtagagatggggtttcaccgtgttggccagactggtctcgaactcctgacctcaggcaatctgcccgtctcggcctcccaaagtgctgggattacaggcatgagccaccatgcctggcctctcaggtttttgttggttcttcttcttcttcttttttttttcccctatttgtttattttggtttccttcatgttggtggttttacttacatgtctggtagtccttgaatgtgtactcatatttaacagtgggagaccttgaagctgtttggagctctgtgtccataactaagtcttggcaatttggtctctgttatgtcaccactgagggtggtctggctgggctgtttggtgggaatcttcaatgtcagtatctttactgtatcttaggtcattaagtctttcctcttagacctccagtcagtttcccagagcagcctcttctagtcttctgtgcagaggcagatgatctggctcttggtgtctgggagccacaggggaagagggttgggtttgggaaagagtctcatcatgtagtgtacttaccttattgaatccccctctttcaggatggtgtccccatcaactgggcctgctatcctccatccagaaaccctctgttttactctctctggtggataaacctccagtcttgggccaggatgtggaaggggcagtcacccagctctgtggagtttggagagtacctgcctgtttcttaaacagactttcaaataatcctccttatttagcatccccattaacctcacttccagaggttgctgagattagtaattcgtgaactttaggaatcctgccttccaaatgttttggggcttcctccagggctggcttgagaagattcttctctctctctctctctttctctgttaagtcttttctatttgttcattcgctttccagcttccaaaatgtggatgcttttgcatttctctcttgttctccccatccctccctcatctaggtttatgtcttttcttttcttttttttttttttttttttttttttgagacggagtcttgctcgctcagttgcccaggctggagagcagtggtgcgatctcggctcactgcaagctccgcctcccaggttcatgccattctcctgcctcagtctccggagtagctgggactacaggcgcccgccaccatgcctggctaatttttttgtatttttagtagagatggggtttcactgtgttagccaggatggtctcgatctcctgacctcgtgatccgcccgtctcagcctcccaaagtgctgggattacaggtgtgagccaccacgcctggctggtttatgtctttttaaaaattccctggtcgggcgtggtggctcacactgtaatcccagcactttggaaggccgaggcacgtggatcatgaggtcaggagatcgtgaccatcctggccatcatggtgaaaccccgtctctactaaaaatacaaaaattagctgggtgtggttgtatgtgcctgtaatcccagctagttgggagactgaggcacgagaattgcttgaaaccgggaagtggaggttgcagtgagccgagatcgtgccactgcactccagcctggcgacacagcaagactccgtctcaaaaaaaattccctttggcccaggtgcgatggctgatgcctgttatcccagcactttgggaggccgaggtgggaggataacttgaggccaggaattggagatcagcttgggtaacatagtgagacccccatctctacaaataataaaaaattagctgggtccaggcgtggtggctcatgccagtaatcccagaactttgggaggcagtggtgggtggatcacttgaggtcaggagttggagaccaccctggccaacatgttgaaaccccgtctctactaaaaatacaaatattagctgggcgtggtggcgggtgcctgtaatcccagctacttgggaggctgaggcaggagaatcgcttgattctccaggcggaggttgcggtgagccaagattgtgccactgcactccagcctgggcaacagagcgatactgtctcaaaaaaaaaaaaaaaaaaaaaaaaggccaggcgcttgtaatcccacagcactttgggaggccgaggtgggcagatcatgaggtcagatcgagaccatcctggctaacatggtgaaaccccatctctactaaaaatagaaaaaaattagccaggcgtggtggcgggcgcctgtaatcccagctactcgggaggctgaggcaggcgaatggggtgaacccgggaggcggagcttgcagtgaaccaagatcaggcctctgcactccagcctgggagacagagtgagactccgtctcaaaaaaaaaaaaaaaaaattagccaggcacagtggcacacacctgtggttccagcttctcaggaggctaaggtaggaggatggcttgaggccaggaggtcaaggctgcagtgaaccaagatcatgccactgcactccagcctggatgacagtgagaccctgtttcaaaaaacaattttttaaaaaaaaaaccctttgacctataatcccagcactttgggaggccaaggtaagaggttcacttgaggccaggagtttgagaccagccttggcaatatagtaagaccctgtctctatttgtaaaaataaaaaacaacaaacaaaaaaaccctttgggaggacatgagagtaggtgcatgtgctcattctggcatcaaaatgagatgtagatgttattacctattttgcagatgaggttgaaggtcagagaggtgaaacagcttgtctaaggacacagcttataggtgacagagttggggctggccctaagacagtgctcttggagaacaaggatcctgactgaagatcaagacacgggtgtcccagagccacagcatcctcatattagcagggcctttagagaacagttggtccaaccccctcattttatgggtgagaaaaaggaggctcagaatggagaagggattctcccagagtcatgcagcaagttcgtgcaaaaccgtgaggagaaatgctccgtgctacaccacccctttctgtgacatccattcagtcattgactcagcaaacatttattgagcaccaactgtgtgccagatcctgtgctatgctgggaaatacagacatgagtaaaacttggtccttttttaaatttcttttttgagacacagtttcactctgttgcccaggctggagtacagtggcacaatcttgggtcactgcaacctccgcctcccatgttcaagtgattctcctgcctcagcttcctgagtagctgggattacaggtgcctgccaccatgcttggctaatttttgtattttttaattaattaattaattaattaattaatttatttattttgtttttgagaccgagtctcactctgtcgcccaagctggagtgcagtggcgcaatctcggctcactgcaacctctgcctcccgggttcaagcgattctcctgtctcgccttcccgagtagctgggactacaggtgcctgctaccacatccagctgattttgttttattttttgtagagacggggtttcaccatgttagccaggatggtctcgatctcctgacttcgtgatccgccagcctcggcctcccaaagtgttgggattacaggcgtgagccactgtgcccggctgtttgtttgtttgtttatttatttatttatttatttatttatttatttatttgagacggagtctctctctgtcgcccaggttggagtgcagtggcacaatctcggctcactgcaacctctgccttctgggttcaagtgattctcctgcctcagccttctaagtagctgtgattacaggcatgccaccacccccagctaatatttgtatttttagtggagacggggtttcaccatgctagccaggctggtctcgaactcctgacctcaggtgatccacccacctaggcctcccaaagtgctgggattacaggtgtgagccactgcgcccagccataaaacttggtacttgcctataaggaggcttcgtcctgcttcctgctggctgccaggcctccttgctggaggtgcaaaggaggagaacagtaataacagttaacatttgctgagtgcttgcttcatgccaagcactgtttgaattatttttcatgtattagtgcatttcattttcccagcgagcctatgaggcaggtcttggtaataggcccacttcacagctgagaaacttcaggcatgcagaggctgggacgcacaatcaggcagctccagagtcggagctttaaccaccaccctgaaatgaggactgccatgagggagggggtaaagggagaagagcaggcgttggagggagggtgagctgaggggaaggggcaaaccaacctgatctgcctccctcctcctttagtgctcagtgggcccctcctctgataaggccctgaccttcatgaaggaccatttcctgatggatgagcaagtggtggggacgcccctgctggtgaaatctggcgtggagtatacacggcttgcagtggagacagcccagggccttgatgggcacagccatcttgtcatgtacctgggaaccagtgagtaaagagttccgggacatcccccagaggactagagcagaggatgcccccaggttgaggagggaaacccttgagttcattcacttattcattcaacaactgtttactgagcacctgctatgtgcctggcattctgctaggttctggaaatacagcagaggagcaaaacagtccactccctaccctttctgagcttcctatggtgggggaggcagacagggaggtctttggtggctttatcaagagctgtgtgtcttatgagggaagctatgttagaggaatgaaaggtgagtgggtggaggggagctggaaaccgcacatgtagagatcactccttcaggaagctcgtctgtgaagggagagaggaaggaggtggtggctggagcacggagtggggcgcagctggggttcttggttttgttttttccccctccttgcccccagggttcttgttttgtagacaggaaggactaagcatctagtagacagggggatggcaaagagatgggtagaagaagggataagtggcaggtaaagttgtggcgggagcaggcggccagagtccaggacacatgtcgagctgggcagctgtgggtggcgggggggacagcacctgagctgggctgggagtgaagctgtagcagcggggtgtgacttggtgggtgtgcaggctcagggtaggaagccaagggagctcttatttgaaggcttttgtgttctctatgtaggtggaggacacaaggtcatgagctgggagtgagggggcaggaaaggtgggaggtttgaggagagagaggtagattcaaatagccattgtgggctgggcacagtggctcacgcctgtaatcccagcactttgggaggctgaggtgggtggatcacctgaggtcaggagttcgagaccagcctggccaacattgtgaaacccgtttctactaaaaatacaaacaaattagcagtgtgtagtggcacgcacctgtaatcccagctactcgggaggctgagtcaggagaatcacttgaacctgggaggcagaggttgcaatgagccaaaattgtgccactgccctccagcctgggtgacaagagtgaaaatccgtctcaaaaaaaaaaatagccattgtggaaagagggagacggagtcagcagagaatgcagcaagactgcccaggcagactgctcaggcaggataaccttgagggtcagtggaagaaatttgtcaagttcattcattccttcaggacagattactaggcactgtatcagctgtgcatgtattgggtatacagcagagaacaaaacagtcaaaaatctcagtctttgtggagtggatggagacagacaatagcatcctgaataagtaaattacatggcacatcatgagatttgagtcacgtagaggtgtgtgcgggggaatcaggaatgccaggtaaggaggttgcacctgttaaaagggtggccaggtagacctcactgaggtgcttgatggatgtgagggaggcaggtgatgtgattttctacagaagcacccagccgcccactgtttcatgcctatggagaaatagctgggtttctccagggacaaagttttgtcagggagttgcaaaggaaggacaggggtccaagggattttagtcatttacaagagactgccatctccatggcacagaggaaggtgaatgatctggctgacccgcgcccagtacatatcaccctcagaaggagctttcttacagctggggaggcccccggaagttgggaagggatctgtggatgagatgagatgacttccactctctctgtctccccatagccacagggtcgctccacaaggctgtggtaagtggggacagcagtgctcatctggtggaagagattcagctgttccctgaccctgaacctgttcgcaacctgcagctggcccccacccaggtgggaagggacctgaccatcaaatggccttccagtggggctggccttgggggcctgttgggctggctccctgggcctgcaccagcgtgctgggactttactagatgtggctggggctccctgacaatctccatctctcttccagggtgcagtgtttgtaggcttctcaggaggtgtctggagggtgccccgagccaactgtagtgtctatgagagctgtgtggactgtgtccttgcccgggacccccactgtgcctgggaccctgagtcccgaacctgttgcctcctgtctgcccccaacctgtgagtgccagtcctggatggtggcctggatggccagccaggacccttctcagccagcttctgctactgttcttcctctctccaggggctactgacatattcactccaagagtcctcccatcctgcagtgggttcctccagggatggagtttccaggcagttttgaagctgctctggccattccgcgttcctctctctgttcctagtctcccctggcctaccttcttccctactgcacttcctcccttcctccttcctcttcccactttcagctcttttgaaggataatttttactttctctgctctcttaggaactcctggaagcaggacatggagcgggggaacccagagtgggcatgtgccagtggccccatgagcaggagccttcggcctcagagccgcccgcaaatcagtgagtgtaggaccactcaccaggggaggtgcaaaggctctggaagacttttgggcaggggtgggcattcctgctccaatttcctcccccagcacctgcctggcttgagatctgaacacccgagttgggatggatttgggtcctggctatagggaagaggcataggaattctgagctggaggccaagctgggattcaggattgaggttgcagttgattttggtgtctgagttggagttaggtggactggggcttagtttggggtccagactggagattaaggaggagtgaaatttgagtttgggattgaaatggaagttggagataagagttagggtccaggccaggctcagtggctcactcctgtaataccagcactttgagaggctgaggcgggactcccttctaccattgtttgagctcatgagtttcagaccagcctggccaacatggtaaaaccccatctctacaaaaattaaccaggcgtggaaacacatgcctgtagtcccagctattcgggaggctggggtggaaggatgccttgagcccagaaggcagaggttgcagtgagctgaggttgcagtgagctgaggttgtgccactgcactccagcctgggcaatagagccagaacctgcctcaaaaaaaaaaaaaaaagagggctggggtccaaagataggttagagactctctcctgtctccatccttcacttctcccttaacccttttgctcctttctttctcctacagttaaagaagtcctggctgtccccaactccatcctggagctcccctgcccccacctgtcagccttggcctcttattattggagtcatggcccagcagcagtcccagaagcctcttccactgtctacaatggctccctcttgctgatagtgcaggatggagttgggggtctctaccagtgctgggcaactgagaatggcttttcataccctgtgatctcctactgggtggacagccaggaccagaccctggccctggatcctgaactggcaggcatcccccgggagcatgtgaaggtcccgttgaccagggtcagtggtggggccgccctggctgcccagcagtcctactggccccactttgtcactgtcactgtcctctttgccttagtgctttcaggagccctcatcatcctcgtggcctccccattgagagcactccgggctcggggcaaggttcagggctgtgagaccctgcgccctggggagaaggccccgttaagcagagagcaacacctccagtctcccaaggaatgcaggacctctgccagtgatgtggacgctgacaacaactgcctaggcactgaggtagcttaaactctaggcacaggccggggctgcggtgcaggcacctggccatgctggctgggcggcccaagcacagccctgactaggatgacagcagcacaaaagaccacctttctcccctgagaggagcttctgctactctgcatcactgatgacactcagcagggtgatgcacagcagtctgcctcccctatgggactcccttctaccaagcacatgagctctctaacagggtgggggctacccccagacctgctcctacactgatattgaagaacctggagaggatccttcagttctggccattccagggaccctccagaaacacagtgtttcaagagaccctaaaaaacctgcctgtcccaggaccctatggtaatgaacaccaaacatctaaacaatcatatgctaacatgccactcctggaaactccactctgaagctgccgctttggacaccaacactcccttctcccagggtcatgcagggatctgctccctcctgcttcccttaccagtcgtgcaccgctgactcccaggaagtctttcctgaagtctgaccacctttcttcttgcttcagttggggcagactctgatcccttctgccctggcagaatggcaggggtaatctgagccttcttcactcctttaccctagctgaccccttcacctctccccctcccttttcctttgttttgggattcagaaaactgcttgtcagagactgtttattttttattaaaaatataaggcttatg

SEQ ID NO: 166 - DNA, 38234 bp, Homo sapiens
cagtttatgacagaagggcaaaaacattgactgcctcaaggtctcaagcaccagtcttcaccgcggaaagcatgttgtggctgttccaatcgctcctgtttgtcttctgctttggcccaggtaaatgtcaatccagatcggtgtagtcactgagtgactccctggttttgtgcagcttgctcaacctaaatcgtctgtatacagttgtctggctctctgccaagggattggggcgggaaaggggacgctggcagtgttacctgatatactactacctcctctcaactttggatgcgataagcctgagatggttgtcggtgaacaatttcaattgtgtctgcatgtaagaaagttatttgctggggcagaggaaataagcttttgaagacaagactgtttgtggtttatgaccagcatcttgtgttataaagagtaccaagaccaagaaaatgggccctcataccaatgtatctactatcgtactgtgaacctcagggaggttacttatccttcctgaacctcactatcctcatctaaattattaaaaacctattattcagttgagccaaattttctgggcccaaccaaacacaccaaaaataaccctctcaccttttgctcattgcaaaaaaaaaggtttccatctctcccctcctttagtgcaaattagggctagctagtccagcaatgcattatatatggcagtgagaaaagaatgaactgatccagctggcttcttgtttcctgctgtccattatatggagaagatgaagattcatatcacatttggggaactacaagtggtccacgggagacaaagtgtagcattcaggcagagatagtccaggagaccaatggaaatctagtccagagctagcccagggtagcagataaaagtaggaagcattcactgagcacttattgtatttcaagtattgtgccaggtgctgtacacacgttatgagtctcatgagaattctatgaatttatactattaatatctccattttaaaatgaagaactgaggtgaacttaatttaaataatttgcccaaatttcattagccagcatgcgacaagctcttgtaatagttatgagaaaaaataacagttcaacaagtgtggcagcagcataagagaaagaagagactgaagcaagagatcccatcaatatggagttaagtagagtaattggtaattggaatgagaaaggaataaatattcattgagcacctactgaatgcttggcactcttctagtttgcatgaatacatcatgaacaaagcaagcaaaaattcctgccctcatggagttaacattttagcaggagacaaactgtaaaaaaagataaacaagtaaaatagtgtattgggtaggaagaaataaatcaagaaggaaagggagagatgaaatatggtaaagacggcagtgaaatttcagacaggatagccaaagaaagtgacaaaattggaaggtggagagcagccacaggaggaaggtgagttcaattttggacctactgattttaggatgtcagtgtgctatacatgaggaagttacgtggaggatcctgggaacttaggactaggggtagagctgaggctagagacttaaaaatcaatggcatagagatatgttaagctgaggagaaaactggaatgagaacagaactttgggaaatatatataaaatgcagaaagagagagaattctttccttcattcaagagccacttcctgatctaggagcagaatcttgagtttttgcttcatttttaccaccctgcaaaattatttccacctctagaataaaatattctgaatgtccttgtgttaaaactcctcttcttctccctatttccatgaatacttcttataatgaccctatgaaatatacagtgctccaatctccacttcacagatggggaaagaaggcacagaacactaaagtaacttgctcactgccccacatttatgggggaaatgggtatagaaagagaaacacatttgaatgagtttacaggaggcagatgcaggtgttctgagacccaggaggagagaagtggctgctagaattggaaatcaggaagcttggctccggagtctgtgctcatagccacttcactatgctacttagcttacacacagtcatacattcacacaaatgtgtacataattagaaaatgtgaggccagcaaaaaaaataagcagggcaccttcatagagaaaaacacggggacctgctttggacggagtgatgaagaaaggacttcctggaaaagtaacatctcatctgatatttaaagggtgtgaaaagttaaacaggaaaagtcaaatgaagaagattttagggcagagggaatcatgtgtgaaaagccgtgatgcaggaaagagcctggagtgatttaggaagggaaagaagaccactgttgcaaaaatgtggggcaaatgaaattaatctttgaaacaaccatgaaaaacaatgactcatgccagcctacattctttgaagtgggttgggcactatcctgactccttttagaaaatttagtggaaaagacaaaccatattgaaaaataatcccatttcctttaactcaagccctgggtggcaaaactaacagaacaaaacaataattgtaaataaaatcaagcatcatgacttcctagagaaaataaatctcgtttgtttcttcattttgatttttatagatggaaagttggaaatttgtcaaacttaaatgtgcatataaattacttgggggaatcttattaaaatgctgattggggaatagggactgagattctgcatttctaagaggctcccaggtgacaccaatgctgcctgtccatggaccacactaagcagcaaggttctaaattccaatggacttcagtcatactgggattgtagggaggaagaaatagaaactaactttgagtgtgtttgcaggaagcagatataggtattctgaggtccaggagagagcagtggttggaaatgtaagtaaagcaaacacatgagggctgattctgaggttgagtcaaaatgtgcaatgctcttctgtgaagagattgtgacctgatggcccccgagcagtgttatctactttttaccaaccgtccacatctttcaaatgtttattgtgctcaacaggcagagagctgttttatattttttcattatcctcagacacgtgtttttccacctctcagaatctgcaatctccaatgtgacctccaggtgttcatgcctctgtttttggtcccttaacccagattcagctttgattgtttctctgttcacactcagacattttttattaaggtgaaattcttgtaacaggatgtaataattttaaagtgacattttgtacattttgtgaaaccaccacttctattattctaaaacattttcatcaccccaaaaggaaaccctgtacccactaagcagtcatttcccattctcccctcccccccagcccctggcaaataccgatctgctttctgtctctgtgggtttacctattctggataatttcatataaatgaaatcacacaatatatgacctttcgtgtctgacttctttcacttagcatcatgttttccaggttcacctatgctgaaccatgtatcagtacttcattcctttttggctgaatagtattttgtattctgtatatactacattttatttatccatttatctatcagtggacacctgggttgtttttgccttttggctcttgcgaatagtgctgctatgtgtacaagtatttgactacctgtttttatctgggtatatacctaggaatggatttgtcagatcatataattctatgcttaactttttgggaaattgccaaactgttttccacaatggctgtaccattttacatttccactagctgtgtacaagagttataatttctccacatcctcatcaacacttgtttttttcctttttaaaaagattattatcaccatcctaataggtgtgaagtggtatattattgtggttttgatttacattttcccaatgacaaatgattttgagtatctttttaagtgtttattggccatttgtatatcctctttggagaaatgtctattcaagtcctttgcccattttagttgaattatttgtctttttgctattgagttataagagttgtttatacattcttggaaccagacctttaatacatgacctgaaaatattttctcccattctgtaggttgtcttttcactttcttaataatgttctttgatgcacaaaagtctttaattttgatgaagcacaatttacctatttttatcttttttcttttttatcattttattttaagttccaggatacacgtgcaggatatgcaagtttgttacataggtaaacatgtgccctggtggtttgctgcacctatcaacctcacctaagtattaagccctgcatacattagctatttttcctgatgctctctctcccccctgccccacccccgacaggccccagtgtgtgtcattccccttcttgtgtccatgtgttctcattgttcagctcccacttaaagaacatgcggtgtttggctttctgttcctgcattagtttgctgagaataatggcttctggcttcatccatgtccctgcaaaggacatgatttcattcctttttatggctgcatagtattccgtggtgtatacgtaccacattttctttatccggtctatcattgatgggcatttgggttgatttcatgtctttgctattatgaatagtgctgcaatgaagatacacgtgcaatgaacatgcacatacacatatctttataacaatgatttatattcttttgggtatatacccagtaatgggattgctgggtcaaattgtctttctgcctctaggtctttgaggagtccccgcattgtcttccagaatagttgaactaatttacattcccaccaacagtgtaaaagagtttctatttctccacagccttgccagcatctgttttttcttgacttctaaataattgccattctgacctgtgtgagatggtatcccattgtggttttgatgtgcatttctctaatgaccagtgatgttgagcttttttccatgtttcttggccacataaatgtcttctttttttttttaacacctgaagagtaagtttaatggaattcatagttacagatattcagaaaatatttgttgggggaactaattaatacatttctttcttttaatttttatttttagttctgggtacatgtgcagtatgtgcaggtttgttacataggtaaacctgtgccctggtggtttgctgcacctaccaacgcatcacctaggtattaagcccagcatgcattatctatttttcttaatgctctccctcccccaaccccactccccaagaggccccagtgcatgttgtttccctccctgtgtccatgtgttctcactgttcagctcccacttacaagtgagaacatgcagtgtttggttttctgttcttgtatgagtttgctgaggataatggcttccagcttcatccacattcctgcaaaggacatgatctcattccttttgatggctgcatagtattccatggtgtatatgttccacattttctttatctcgtctgtcattgatgggcattttggttgattccaggcctttgctattgtgaatagtgctgcaatgaacatatgcatgcatatatctttgtaacagagcgatttatattcctttgggtatatacccagaaatgggattgctgggtcaaatggtatttctggttctagatctttgaggatttgccacactgtcttccacaatggttgaactaatttacattcccaacagtgtaaaagtgttcctatttctccagaacctcacaagcatctgttgtttcttgactttttcataatcactattctgtcatgagatggtaatttattgtggttttcaattgtatttttctaatgatcagtgatgttgagctttttttcatgtttgttggctgcatgaatgtcttcttttgagaagtgtctgttaatgtcctttgctcgccttttaatggggttgtttgatttttttcttgtaaatttgtttgagttccttgtagaatctggatattagacctttaacagatgaatagattgcaaaaattttctcccactctgtaggttgcctcttggctctgataatagtttcttctgctatgcagaagctcttcagtttaactagatcccatttgtcaatttttgcttttgttgcaattgctttcagtgatttcataatgaaatctttgcccatgcctatgtcctgaatggcattgcctagattgtattctagggttttcatagttttgagttttacatttaagtctttaatctatcttgagttaatttttgtataaggtgtgagggaggggtccagtttcaattttctgcatatggatagccagttctcccagcaccagttattaaatagtgaatcctttccccattgcttgtttttgtcacgttttttgaagatcagatagtggtagatgtgcagtcttatttatgggttctctattctgttccattggtctatgtgtctgttttgtaccagtaccatgtaccgtgctgttttggttattgctgccttatagtattgtttgaagtccagtagcatgatgcctccagctttgttccttttgcttaggattgtcttggctatatgagcccttttttggttccatataaattttaaaatagttttttctaattttgtgaaaaatgtcaatgatagtttaatgggaatagtagtgaatctattaattacttcgggcagtatggtcattttcatgatgttgattcttcctatccatgagcacagaatatttttccatttgtttgtgtcctctctggtttccttgagcagtggtttgtagttctttttgaagaggttccttcacttcctttgttagctgtattcctaagtattttattctctttgtaacaattgtgaatgggagttcattcatgatttggttctctgcttgcctgtgtgtgttgtataagaatgcttgtaacttctgcattgattttgtttcctgagatcttgctgaagttgcatgtgagcttaagaagcttttgggctgagatgatggggttttctagatataggatcgtgtcatctgcaaacaaagataatttgacttcctctcttcctgtgtgaatatgctttatttctttctcttgcctgattgccctggtcagaacttctaatactatgctgaataggagtggtgagagagggcatccttgtcttatgctggttttcacaagaaatgcttccagttttgcccattcagtataatattggttgttggtttgtcataaatgtctcttattgttttaagatatgttccatcaatacctggtttattgagagtgtttaacatgaagggatgttgaattttatagaaggccttttctgtgtctattaagataatctgtggtttttgtctttagatctgtttatgagatgaattacatttattgatttgcatatgttgaaccagccttgcatcccaggaataaagccaactcgatcagggtggataagctttttgatgtgccgctatatttggtttgccagtattttattgagaatttttgcatcagtgttcatcaggatattggcctgaagctttcttttttgttgtatctctgccaggttttggtatcaggatgatactggcctcataaaatgaattagggaagggtccctccttttcaattgtttggaatagtttcagaagaaatggtgccaggtcctctttgtacctctagtagaattcagctgtaaatccttctggtcctgggctttttcttttagactatttattactgtctcaatttcagaatttgttattggtctattcagggattcagcttcctcctggttcagtcttgggagggtgtatgtgtccaggaatttatccatttcttctagattttctaggttatgtgcatagaggtgtttatagtattctctgatgattgtttttatttctgtggggtcagtagtgatatcctcttttaacattttttattgtgtccatttgattcttctctcttttcttctttgttagtctagctaactagcagtctatctatattattagtttttcaaaaaaccagattctggactccttgatttttttgaagcattcttcttttatctatctccttcagttctgctttgatcttggttatttcttgtcttctgccagctttggagtttgtttgctcttggttctccagttcttttagttttaatgttagcatttcaatttgagatctttctaggtttttgatgtgggcatttagtgctctaaatttccctcttaacagctgctttagctgcatccagagattctgatacattgtctctttgttctcattggtttcaaagaacttcttgctttctgccttaatttcattatttaaccaggagtcatgcaggagcaggttgttcaatttctatgtagctatgtgattttgagtgagtttctttgtcttgagttctaatttgattatgctgtggtctgagagactgtttgttgtgatttcagttcttttgtatttgatgaggagtgttttacttccaattatgtgatcaattttagagtaagttccatgtggcaatgcatagaatgaatattctgttgttgtaggatggagagttttgtagaggtctatcaggtccacttgatctagagctgagttcaagtcctgaatatctttgttaattttctgtctgaatgatctgcctaatattgacagtggatgttaaagtctcccgctattattgtgtgggagtctacatctccttgtacgtctctaagagcttattttaggaatctgcttttgtattgggtgcatacatatttaggatagttagttcttcttgttgaattgaaccctttaccatgcctttctttgtcttttttggtctttattgctttaaagtctattttgtcagaaactaggattgcaatccctgcttttttctggtttccatttgcctggtagattttcctctatccctttattttgaacctatgtgtgtgtttgcatgtgagatgagtctcttgaatacagcacaccaatgggtcttcacaatttacccagcttgccattctgtgtcttttaaatggggcacttagcacatttatatttaaagttagtattgttatgtgtgaatttgatcctgtcatcatgatactagctagttattttgcagacttattgatgtagttgcttcacagtttcattggtcttcattgtgtacttcagtatgttttgtagtggctgataatggcttttcctttccatatttagtgcttccttcaggagctcttgcaagtcaagcctggtggtggatgaattccctcagcatttgattgtctgaaaaatattttatttctcctttgcttatgaagcttcatttggccagatatgagattctgggttgaaaattcttttctttaagaatgttgaatattgacccccaatctcttctggcttgtaaagtttctgctgagaggcctgatgttattctgatgggcttccctttgtaggtgacttggcctttctctctggctgcccttaacattttttccttcattttgaccttgaagaatctaataattatgtgtcttgtggttgatcctctcatggagtatcttactgggttctttgtatttcttgagtttgaatgttggcctgtcttgctaggttggggaagtctcctggatgatatcgtgaagtatgttttccaactttgtttcattcacctgtctctttcaggtaccataatcagttgtaggttcggtctctttacataatcccataattctcagagattttgtttgttccttttcattcctttttctctaatcttgtctgcctattttatttcagcaagatagtcttcaatctcttaaattctttcctccacttggtctattcggctattgatacttatgattgcattgtgatgttttcatgttgtgtttttcagttccatcaagtcatttatgttcctctctaagctggttattctgatgaatagctcctgtaatgttttatcctgattcttaggttctttgcattgagttagaacatactcctttagctcggcaaagttcattattacccaccttctgaagcctacttctgtcagttcatccttctcagcctgagcccagttgtgtgccctgctggagaggtgttacaatcatttggaggagaagagacactctggctttttgagttttcagcattttttattgattctttctcatcttcctgagtttatctagctttgatctttgagtctgctgatctttggatgggctttttgtggggacttttttgttgatgctgttgttgttgctttctgtttgtttttcttttagcagacaggaccctcttttgcaagactgctgcagtttgctgggggcccactccagatcctattcacctgggtccctccccaccctggtggtgtcaccagtggaggctgcagaaccgcaaagatggctgcctgcttcttcctctgggagctccgtccaagaggggcaccaaactgatgacagtgggagtgctcctgtataaagtgtctggtaacccctgctggggagtctcacccagtcaggagtcacaagataagggacccacttaatgaagcattctgtctgtcccttggcagaaaggatgtgctgtggtgggggggatcctacttatccagactgcccagattcctcagagccagcaggggaaaagactaagtctgatgatccacagagtccgcagccccagtacccacagggactcaatcccagggagatcagggttctgtccataaacccttggctggagttgctgaaattcccacagggaggtcccattcagtgaggagggatgagtctgggtccagcctaaagatgcagtctggccacagtctgccacagctgctgtgctgcaccatggggaattcctcctggttccaaaccaccagtccctctggcactggcaggggaaagcagcagacagaagctgcagtgatggctgctgccccttcccccaagaactcagtagtcttagacggtctccagccaagtggcagctgagaatctgcacagctctgtgcttgggatccaaggcccttgtggtgttggctcacgaggggatctcctggtccatgggttgcacagatccatggaaaaagcatggtttcctgggtggggtagcacaatcactcaccacttcccttggctgggggtgggagcaccccttgccccatcagcttccaggtgggctgttgttccaccctgttttcctcactccctgtgggtcatgccaaccacctagtcagtcccaatgagtgagcctggataccttagttgctggtgcaggattcactcactgttttcgttcttctcagtgggatcctccaaccacagctgtttctagttagtcatcttggcccctccccacattttatcttttcttacttatgcttttggtgtcatatatcagaatccattcccaaatcaaaaatcatgaatatttatcattatgttttcttctaagagttttagctcttatatttaggtgatcgatacattttgagataatttttgcatataatgagaggaaggggcccaacttcattctgttgaatgtggatatccagttgtcccagcaccatttgttaaagagagcattctctccctattgaatgatcttagcactcttgtcaaaaatcacctggccataaatgtttgggtttatttatggactctcaatttaatttcatatagacatctataagtttatctttatgccagtaccacactgttttgattaccatatctgtatcagttttgaaattggaaagtgtgagtccaccaattttgcttttcttttacaatattgttttggctacttggggcatcttgaaatcacatataaatttgagaattagcttttccatttatgaaaaaaaatcaacattttgataaggattgcattgactctataaattgcttttggtggtatcggcatattaatattatcttccaattaatgaacataggatgtatttccatttatttagattttctttctttcagaaatgttatttagttttcagtgtattatcttgaacttctctggttaaattattgccaggtattttgttcttttgaatgctactgtacatggaactgcttttcttaacttctttttcagattgttcattgctagtgtgtaggaacagaactgatttttatacattgattttgtatcttgcaactttgctgaatttatttattagctctgatcatttttgtggattctttaggattttctattttcaacatcatgttatctgtgaataggaatagttttacacattctttttcaattgagatgcattttatttatttttcttgcctaattgctctggctagaacttccagttcaatattaaatagaagtggtgagactgggcactgttgccttttcatgctgttatttgaaaggcttttagtcttttatccttgagtaaaatgttagctgtgggttttcataaatgccttttatcagactgaggaagttcccttctatttctagattctaaagtgtttttatttaaaaggtgctggtttttttcaaatgttttttctgcatcaactaagatggccattagtctatttttcttcattctgttaatatcatatactgcattgattggttttcatgtattgaaccacttttgcattgctgagataaattctacttggtcatggtgtataatccctttaatatgagctggattcagtttgttagtattctgttgaaagtttttgcatcaatattcataagggatatcagtctgtagttttcttttttctgatatttttggctttggtatcagggtaatgctgacctagtaaaatgacttaggaagtgtttttctcctcttctatttttgggaagagcttgagaataattgaaactaattattctttgaataattagtagaatttaccagtgaagccatctggattttctttgtcaggaggtttttgagtactgattcaatctcttttcttgttataggtcctctttaattttttatttcttcttaagtcagtcttggtattttatgtgtttccagaaatctatttcatctaggttattcaatttgttggcatatagttatttatagtgttctcttaatccttttagttgttatttctataagatctgtagtaatgtctccacttctatgtctacttttagtaatttgaatcttttctattttattctttgtcaatctagctaaaggtttgtcaattttgtttatcttttcaaagaaccaacttttggtttcattgattatttctcttgtttttctattctctatgttatttatctctgctctaatttttatgatttgcttcattctaatagctttgggtttagtttgctcttctttgtctagttttttaaagtgtaaatttcctccttctttatttttttaatatactttaagttctagggtacatgtgcacatcgtgcaagtttgttacataggtatatatgtgccatgttggtttgctgcacccatcaactcgtcatttacattaggtatttctcttaatgctatccctcccccagctccccaccccctgacaggccccagtgtgtgatgttccccaccctgtgtccaagtgttctcattgttcaattcccacctatgaatgagaacatgtggtgtttggttttctgtccttgtgacagtttgctgagaatgatggtttccagcttcatccatgtccctacaaaggacaagagctcttccttttttatggctgcatagtattctatggtatatatgtgccacattttcttaatccagtctatcattgttggacatttgggttggttccaaatctttgctattgtgaatagtgccacaacaaacatacgtgtgcatgtgtctttacagtagcatgatttataatcctttgggtttatacccagtaatgggatggctgggtcaaatggtatttctagttctagatcctttaggaattgccacactgtcttccacaatggttgaactaatttacactcccaccaacattgtaaaagtgttcctgtttctccatatcctctccagcatctgttgtttcctgactttttaatgatagccattctaactggtgtgagatggtatctcattgtgattttggtttgcatttctctgatgaccagtgatgatgagcattttttcatatgtctgttggctgcataaatgtcttcttttgagaagtgtcttcatatcctttgcccactttttgatgggattttttttttcttgtaaatttgtttaaattctttgtagattctagatattagcgcttggtcagatgggtagattgcaaaaattttctcccattatgtaggttgtctgttcactctgatggtagtttcttttgctgtgcagaagctctttagtttaattagatcccatttgtctattttggcttttgttgccattgcttttggtgttttagtattgaagtcgttgcccatacctatatcctgaatggtattgcctaggttttcttctacagtttttatggttttaggtctaacatttaagtctttaatccatcttgaattaaattctgtataaggtgtaaggaagggatccagtttcagctttctacatatggctagccagttttcccagcaccatttattaaatagggagtcctttctccatttcttgtttttatcaggtttgtcaaagatcagatggttgtagatgtgtggtgctatttctgaggcctctgttctgtaccactgatctatatatatgttttggtaccagtaccatgctgttttggttactgtagccttgtagtatattttgaagtcaggtagtgagatgcctctagctttgttctttttgcttaggattgtcttggcaatgtgggctcttttttggttccatatgaactttaaagtagatttttccaattctatgaagaaagtcattggtagcttgatggggatggcattgaatctacaaattaccttgggcagtatggccattttcatgatattgattcttcctacccatgagcatggaatattcttccatttgtttgtgtcctattttattttgttgagcagtggtttgtagtcctccttgaagaggtccttcacatcccttttaagttggattcctagtcttccttctttctttcagagggataaaaatatccctctgagcactacttttgctccatcccatgttttggtaagctttgtttttgttttcacttggtgtcaagatatatcctaattcatcttgttatttcttctttgatccattgattattttacactatgttaattatgacatatttgtgaattttccaattctccttctgttcttgatttccagttttattccatttatggtcatagaagacatcatatatttaagtcttttataatttattgagacttgtttttgtggcctaatatatggtctgtcctatgagaacgacttatgtgcatttgaggaaaatgtatattttgttgtgtttggatgtagtgtttttcatatatatgttaggtattgttggtttataatgttttccaagtcctctatttccttattgatcttctctctagttgttttgaccattattgcaagtgaggtattgatgtctccaactattactgtagaactatctatttctcccttgaattttgttactgtttgctttatatattttggggctgttgtttggtgcatatgtgtttataattgttataactttttgcagggttgacccttttattaatgtataatgtccttttttgcctctactaataatttttgacttaaagtctatttgccaatattagtatagctactgtaactctcttttggttactacttgcatggaatatcattttccatcttcttcttctaaaagtatttgtgcctttgaatctaaagtgaatctctgtatgtagaaaatagttgaatcctgttttttcaattcattctgcctatctctgcattttaattgaagagttcaattcatttacatttaaagtaatgactgatatgtaaggacctacttcttgcattttgccatttcttttctgtatgtcttaaaccttttcccctcagtccctccactattctattctttcatgtatagtttatatttttaagtttagattcctttctcatttcctttcctgtatttttagttattgtattgttatcctcagtgttacatttaacctcttcaacttataacaagctattttgaattcacactaccttagcttcaataatatacaaacactgtgctccaatgttgtttcattctgctgcctttacgttgttgtaacaaactacatctttgtgcatgtgtgctcattaacagatttataattattgttttactcatttgtcttttaaatcatgtgggaaaaaggagaagttgcaaagcaaaaatgcaagaatactggcttttgtattaatctatgcagtcagatttaccttcattctttgtttcttggtagggatttgagttactttctagtgtgattttatttcagcctgaaagattccctttagtatttcttacagtacaagtctactagcaataaactctatctgcttttgtttatctgcaaatgtcttaacttctccttcatttttgaaggataattttttcagatgtagaattcttggttgatgggtgtttttttttctttcagcaccttaaatatgtcatcccactgcctcctggcaatcatggattcttctgagaaattggctgttgattttattgagcatgacttgtacatgactagttgctttctcttgttgcatttgagactctctccttgttttcatttttctggtttgattataatatgtcttgttatggatctctttgtgatcattcttcttggagttcattgactttcttggatgtataaattcatgtcttctataaagtttgggaagtttggggccattattttttcaaatattatttatgcccttttctctctctctgctcctccttggactcctattatgcttattttttggtatttttgatggtgtcccacaaatctcttaagcactgtacatttttcttcactcttttcttttctgatcctcaaactggataatttcaattgacctagctttgaattagctatttcttacttctgcctacacagagcttctgttgaaagcctctagtgaattttttatttcaattattgtattttttcagctccagaatctctacttggctccttgttattatttctatcttttaaaaatattctcttttctttatatatccttttcttgatttcctttagttctttgtccattgtttcctttagctttttgagcatatttaagatagttgaggccaggcagggtggctcatgcctgtaatctcagcactttgtgggggccgaggcaggtaaatcatttgagcccaggagttcaaaccagcctgggcaacatagtgaaactgcatctctacaaaatattttaaaaattagccagggatggtggcatgtgcctgtagaaccagctactcaggaggctgaggtgggaggatgacttcagcccaggaggcagaggttgcagtgagctgagatcacaccactgcactccaatctgggcaacagagtgagaccctgtctcaaaaaaagacagttgacttaaagactttgtctagcaaatccagtatctgtccttccttagggacaatttctgtttatttcacctgtgaatgggtcacactttcttgttcttcacatgctttataattttttgttgaaactagatatttttaataccataatatgataactctggaaatcagactcttccccttcctcagtattttgttttgttccttgctctgggttgtaattcttgtttttttagtgactattctaaactatttttgtaaacatattatttgtcacatgtagtctctaaaatgtctttttctttagcttatggtcaactagtgttttgacagatatttctttgaacaccagaaggaataaacaaacaaataaataaataaattctgtgcttgtctttgcagattggctctgttttggggcactcctttaatgcctagacaggctaccactctgcgttagccttgactttcttcttgtacccagcataattatcagccatagataaaatcttagagtcttctcagaacttttctaagtatgcaccctgccctaggcatgtatgtggctttccaaattccctggtataagcagacattttcttaatgcctgaattcttctaagaatctttctccccagcttttcttcccaggcattcgacatatctattttttgcctccactataatgttttgccccaggtattgatgggttattcattgcctttcagtgtttatgagaaatgtcctctgcatggctaattttctacctgaaagagaggtagttgagacaaagacaagtgcttttcctcagttttttagggagcatccagatagttgaaaacagacaaatacaattctttcagaaccagttctgctctatgcctgctggaaccagtgaccatggtctcctactgaaaatgtagacggctgtcttcaagactgctatcaagttggagaaaaaagatcggggaaagggcaatcaaacattctgcaaagctccccaatgatttttttttaattgtgtatatctaagctgtacaacatgacattttgatatatgcagtgaaatggttaccctagtcatgcaaattaacatattcattatcttgcactgttaccctttttgtgcaagtatggtaagagtatctaaaatctactctgagcaaatgttcggtatacaatacaataatataagtatagccttcatgttgtatattagattcctagacttatttaccctacatatctgcaactttgtaccctgtgacctacatctccccatttcctctctgttccctctctccacctctgataaccactgctttatactttgtttctatgtatttggctttttttaactcctttttttcttttgctttttttttttttttttgagatagagtctcactctgtcacccaggctggagtgcaatggcatgatctcagctcactgcaacctctgcctcccaggtttaaacaatcctccccagctgggactacaggcatgttccactctgcctggctgatatttttgtattttcagtagagacagggtttcaccatgttggccagactagaactcctagcatttttaagttgcctctttttttgacccatcatttgtttggttgctataaacctttgactagtttctacagttctgacaaagttgattctgacaatgtttgctcactctgtgtgtgttcgcatgagtgtgcatgttttttgtggagggatggacccttgcagttatttattgtgccattttgactaatgtcactgaccctcagactttaggccagcaatttcaacaaagtagtcaccattcccctgaaatccctctcccctttgatgccacacctacctatactatgcctattgctaatattaggtgatccccagcaccttctttccctgttcctgggctacaagtgctataatcattggagaaagttattagtgtggtgcaaaagtgattgcggattttcccattgaaggtaatggcaaaatccgcaatcactttcgcaccagccaatgcaaaactggatggactccatgaatggtgcgtgtcaaccaagcttggccaattcctcctcactgcttccacactcatttattgatgacttgtcagtttcctaacaaattcctcatagcagcttttacatgtctcatccgtcttcctctagattctatgagatctacttctcttagaacaactttgagaaaaacataagcgaaatattccaacttcttcccctttaccctctaaatcttttgagatctttaaccttattcttttcagtctcaaaagaaaaggagaaccacgtctacccaagactaacctcttcacttatgctcctaagcccaccctggcttcctcctcagaaatgacaccgttttgaatactccctttcaccatatcttaagttttttctttttctcccagctgcttccctttgctccaaatttgctcaggactctgttacctaaagagtaacttccatttgtcctaccttctcaatatcctgactatgtttctcctcccttctctttaaattctcttgagaaatcagcccctactctctttcatactgcatttgcctcctgtggagctaacacagcttgctatattcctgttagctatagatgggcctaagctagtccctcaggttagaaacccaaagttccttgacttttctctctttttcagaatctgcttagttctacctctctcctctctttcctaagacactgctctctttatactttgccaattttcaaaaatacttcatgttttttaataccttccaaactaaccctccactaatcaggtaacccttaaaaacttctctattctaattccaatctacttaacattcactgagttccctggaccaggttatggggaaatacaatgctgactaagatattatttgagttccccaaaacacatcatacagtagatgaaacttgtaaacaaatgtaccccaaatgtctgctgtcttgacatcctcaccagtggatgggcaagacctcagcatcaccttcatgttgcaaggagttccccagtgacttatgagagtctcaaaggaaagcttcccatgagtccccaaagcagcctacgagttgtagccaacatgaggcatctttcccattcttaatctccttttctggttctagtcccccacacaggatgccagcagagccatttagatgccctgcttattccaagaacatcaatgtccatgccaagggtgctggtcccggatgctcccaaagcatcagtgttgattcctggcagagcagagaaaaggacctccatgtgccctctgggccacaccacaacaccttggccctgaagcagctctgctcctgtccaaagtctcatgcagggtcttttaaacattttcagtagcatctgaccttcactgtccctaagcatattgtctcaaatctagttttgctttggtttggttttgggtctgtggggaactattcctaccatctcatccatcctgtgctccttctccctttgcttcaccacaaactcctttctccccttccccatgtaccaatgcaaaacccccataaatataagaggcaaacagatattttagctcatccttgaaggataaataggagcttaccatgtaggaaagatgaagaaaggcattttaagcagagggaaaagcagtgcaaaaaaaaaaaaaaagcaaggcattattggaagaattacaaataattaagtaatggagaactcatagcttttattcaagactttgctacagtgtcatctcctgtgaactgttccctgacaactcccaactcttcccagttcatgattctctaaatttttgctcccatggagcacatatctctaacaattcaacatttattgagctagaaattgtgtgctaagttctaggaatatagaaataataatcagaatccctgacctcaagattatggaaaagaaaagaaaataatcttgtaattataacaaagagaaagaactgcttgcaattgcatgtataactgcaatagtgatacgagggcaatgcagaggcaagccttacactagctcaatgcccaacccaccacatcagaactaactactcatttacctgtcaggctcctctatcagatgatggacccagaggactgacagtatcttatattcccagtttccagtctagaaactggtacataaaacagacctaataaatatgccatggttcctaaggttttactaattgaattagcatggaagttagcaaatattagaatatttgaacaccagaatgaataaacaaacaaacaaataaataaatttctgtgcttgtctttgcagattggctctgttttggggcactcctttaatgcctagacaggctaccactctgccttagccttgactttcttcttgtaagcagcataaatagccatagataaaatcttgttacataaactaattatttcaatctataaaatcaatggaacttaaacaagcgttccaggcaagggaagaacagctcctggtgagtccttaggccactgagtaagcccagactccctaccaaaaggaactgagctttaacattctagacagaaaacctccaagagaagggatggagatatgtccattcactcagtaaatattcatgggatgcttactatgtgccaggtgctgttcaagaatgttcacaatagtagacaaaacagacaaaaatctttgtctccatggagattacattctagtggagaggtgagaaaataaacaaaaacaaatatttaaattataaagtatactagatggtaagtactagatggtaaatccaaaggcagctggatgtgcaagggtggatgggggctgatggtgcaaaaagagtggtcacacttctttaaattctctgagcaggaatgtttgcattaatgactttatggaggcaaaagagtgagctgcatggatacttggagaaagtacattccagacagaaaggattgcaaatgcaaaagccctggcctgctcaaggaatagccaagggggctggagcaaagtgaacaagggggagaatataggaattaggtcaaagaaagagaaatggccagatcattttggtccttatagaccatagacatgattttgttttgctctgcttttgttactgttttaactttttaaactgaaatacaaagagaaaaactatacgaatcttaaatgtcagctcaatgaattatcataaaatgaacaaatctgtgtagccaaatacagatctagagataggacattatcagtattccaggatccttcctttatactccctcctattcaccacctctccctcctcaaaggtaaccactctcttgacttctgacagcatagatttgtctgtttatcaactttaaataaatagaatcatatatttgtattctctggtatctggacattctgctcaaaatgttgcttgtggtattcacccatgtgattcagaggaaagaggaataaagatgacaaataacagtgtgttaaaatgctgatgggaaagatgttgatgacagcaatgttcatgtgcctggaacccatatgacaattcatgaaagagagaggaagtgcaagctcacccaggagctgagcactaggactccaagagacatttccttccctattcagctcctcctataagaaataagaaaccctcagaaatgacaactttccatgctcatggattggaagaatcaacatcgttaaaatggccataccacacaaagcaatttctagattcagtgctattcctatcaaactaccaatgtcattcttcacagaattagaaaaaccattctaaaattcatatggaaccaaaaaaagagcccaaatagtcaaagcaattctaagcaaaaacaaaaaatccagagacatcacactatctgactttgaaccataccataagactatagtaaccaaaacagcatggtaccgttacacaaacagacacatagacaactggaagagaacaaaaaactcagaaataaagccacacccttacaaccatctgatttttgacaaggccaacaaaagcgagcaatggggaaaggactccctgttcaataaatggtgctggataactggctagccatatgcagaagattgaaactggacccttacctttaaccatatacgaaaattaactcaagatggatcaaatatttaaatgtaaaacctcaagctataaaaatcctagaaaaaaataggaaatacccttcttgacactggccttggcaaagaatttttggctaggtccccaaaagcaattgcaacaaaaacgaaaattgacaagtggaacctaagtaaactatagagcttctgcacagcaaaagaaactatcattaccgtaaacagacatcttacagaatgagagaaaatatttgcaaactatgtacccaacataaggtctaatatccagaatctataaggagcttaaaccaataagcaaaaagacgaataaccccattaaaaaatgggcaaaggacatgaacaggcacttcttaaatgaagatatacaagcactcagcaaacatgaaaaaatgctcagcatcagtaatcatcagagaaatccaaatcaaaaccacaatgaaataccatctcacaccagtcagaatggctattattaaaaagtcaaaaaaaagaacacaatagatgctggtttggtttttgatatggtttgattgtgtccccacccaaatctcatcttgaactgtagagctcccattattcccacatgtcatgggagggacctggtaggaggtaattgaatctgggggtaggtctttcctgtgctattctcatgatagtgaataagtctcatgagttctgatggttttataaaggggagttcccctgcacatgttctctttgcctgccaccatgtaagacgtgactttgctcctccttcaccttccaccatgcttgtgagtgccatggcctccccagccatggggaactgtgagtcaattaaacatctttcctttataaattactagtcttgagtatgtctttatcagcagtgtgaaaatggacaaataacacttttttgactttttaataatagccattctgtcagaatgacagctggaagagaacagaaaattcagaatacactaatacacttttttgtatttttgtatagccatatgcagaagattgaaactggacccttcattctttcagaatgtctattattaaaagtcaaaaaataaaaaaaaaacaggtgctaggtcccacttggtgaggttgcagagaaaaggaaacagttatacactgttattgggaaatataaattttcactgtggaaagcagtttggagatttttcaaaaaacttaaaactgagctaccattcaacccagcaatcccattactgggtatatagccaaaggaaaatagatcattataccaaaaagacacatgcacttgtatgttcatactatgctattcataatagcaaagacacagaatcaacctaggttccaatcaatgatggattggataaagaaaatttggtatatatacaccatggaatactaaccagccataaaaaagaattaaatcatgtcttttgcagtaacacgggtggagctggaggccataatcctagcacaccaacacaggaacagaaaaccaaatactacatgctctcacttataagtgggagctaaacactgagcacacatggacataaatatgggattaatagacgctgtggactactagagggggaaggaagggaacaggtaatgggttgaataactacctattagttattatgtccactatctgggtgtgatatacccatgtaacaaatctgcacatgtacccccatatctaaaataaaagttgaaatttttaagaaaaagaagcaagagatcctgagaaggttgaggtaattgttatagttattcattcattgacccactagaacatttccacagactctactatgtgtcagacatggtgctgagtactgacatgcaaggctaattaaggcgtggtcagttagacaaacaggtgaacaaaactacaaaatagtgtaataattgctaagaatttgggaaaggatgctaaggaagcatcttctttaagaatcattgtgaccatttcaccgtttttgcttaaacattgatagttctgaataagttcacaagaatgtggccatcatgtgttactttgaaattatatttattatttctatatgtatccattttgtctcctcaataactaaactataatctttctgagagaattaaaaaaaaatcttctggtatcatgaagacagcacaaagtcactggagtcagaagacctgggtttgaatcctgactctgctattctttagctgtgcaaccctgggaaaattagttaacttttctgtagctcagttcctttatctataaatggaagtaataatatccatcctgcctgcctcacagactgtagtcagcgtcaatgaaataatatataagaagaactgactatcctataaatccctgatattagtccctgttaccagccttctaagttgcacaagcctactatgttggacacacagtaagtaatcagtaaatatcaggctttaattatgctttattagcaaagacttgcagtttttggagtctatagtttcctgtccccctcaacctaatgtccaaggacttcagaggctaggatcacaaagtatagttatgacctaggagtgaccagccagtgtaggacccagcgtggactgggccggtttcatctagactagctgcctactaaccaagagtggctgacattttgctggaggtgaagctctgggactgtgattattcatttagaaacatctcctaccctttcctactctgtcatatctctgagttttggtatcagagagctctaacagactggcagcgttaggtgaaagggtgcaggacttggcagggagatggtcaggaacatttttaaaacctttccttctgtgtttacagggaatgtagtttcacaaagcagcttaaccccattgatggtgaacgggattctgggggagtcagtaactcttcccctggagtttcctgcaggagagaaggtcaacttcatcacttggcttttcaatgaaacatctcttgccttcatagtaccccatgaaaccaaaagtccagaaatccacgtgactaatccgaaacagggaaagcgactgaacttcacccagtcctactccctgcaactcagcaacctgaagatggaagacacaggctcttacagagcccagatatccacaaagacctctgcaaagctgtccagttacactctgaggatattaagtaagtcaaaatatggggtttaattccatatggactgaaaaatatacatgtattccaatcctatgtgacttcaaatgtgcactgtcgcctagtggtaaagaatatggcatttggagtcattgagtcagtgtcaacacaatgacactgcaaagccagttaatgacagagctgaagacagagcctaagtcttgtgtcccagcccagaattacttcactccgataaaatggtcttcttcaaccagaaatgtagcagaagtaatggaagtcaaatatttatgatagtgttgccttgtgcactacatgtatttgccatgtaattctcacaaagactccatgaggtaggtacagaccttatacccttgaggcacagcctcagtcacagtgatttgcctacaagtcacagagatagtaatggtagcacttcccacataactacctgccacgacacctcccttttcacaaaggctagtctgacccagtagagtggtcagtgtacagaacagtggtctacctagaaagttatctgcaaagataggctgataatgagaaacatcctttctgtcaaggttatttaatttttaacaatattttcccccgatggctcatattaatcaccagtcaacaatctgccttcccaagattaaaaagaatgaaaatgttatcaacataaaattatggaaactataatgagatttcttatgagtcaatatcagaaaaatacctctctagcaatcagtgatattcagagatgccattaatggctttagaataatcacttagcaggagattcaagcattaaattggcaatcagaccagaaaacattaaaggccacggaaattctgtaatttttatccacttgagggcctgtagtgtctaaaattcactcagagtcctttgggttaagacatggtactcaaaaaagcactgttaaaataaaaggtctccacagacagattacatgttaacttttagtatcccctgaatatctggtaggtttatcgtgttagattagtcaaaatcatgttcttgaagaatagaacaccaaacaggtaaatgtaatgggaaagaggtgatgtctggaaaacttctatacaagcgattctaactaaaaaggaaaaatcaccctggggcaatgtattactttcctgaggctgctgaaatagaaataccataaagtaggtggcgtaacagaaattcatattctctcacagttctggaggccagaagtccaaaatcacagtgtgggcagggctgtgctccctctggaggctgtagcgggcaatctgctctttgcctctcccagcttctggttgctgtcaacactccttggttttctttggcttgtggctgcatcacaccaatctctacctccatagtcaggttgcctccttcttttctgtctgtctcaaacatccttttgcttttctcttatgggaacatttgtcattgggtttggggactatccaggttatactggataatgtcatataacataattccatctgcaaagaccctttttttccaataaggtaatattcagattctgggaattagggcgcagacagatcttttctgaggtcattattcaacccactacaggcagaatcaccctgggtgaccagtaattatcaaggcagtgtaggacactggagagaagagagactcatccaatggaaagcctgaaatgggtaccaggcttcatcacatttgctgagataatgttcctctaacattgttgagaagaccaggtatgacttatcttgtgacagccaccctcttgaggctcaatgctgatctctttcagggctttttagagtgccatctccttcaaagtcacatacacagagaactgtgtaagctacaccaggtagttttacaatagtgcaaaggaatttcaaggtataagttatataggtttgatttttaacattgatcaatctcttggtatgtgccaggatatgaatggcaaagatttgattttatgggccaataccaattaattgggagtgactgctaacatggtttggctctgtgtccccacccaaatctcatctcgaattgtaatccctacatgtcaagggagggacctggtgggtggtgatttgatcatgtgggaggtttcccccatgctgttctcatgatagtgagctctcatgaaagctgatggtattaagcgtggcacttccttgccctttctctctctctcctgctgccatgcaagacgtgacttgcttccccttgcccttccgtcatgattgtaagtttcctgaggcctccccagccatgtagaactgtgagtcaattaaacctctttcatttataaagtacctagtcttgagtagtatctttatagtatcgtgaaaacaaactaatacaactgcctagagttcagtgttaagaaaatcttgaagccatgataggtttattaattgagtcaacaatatttgttagacatggataacgtccaaggcactgttataggcacctggaatacatcagtgagcaaaacagacaaagatcactgtcctcatggagcagacattctggaagggaagtagaggaaggtaacaagcaattcacataacatataaacaagtgatacagcatgtaagaaagccctgaatggtatgaacaaaggagagattagaacagcataagaagcatcaagagtgccagggagcaggggacaattttaaaagaagtgatcagaacaggcttcattgaaaagatgacatttgagccaagacctgttggaagtgaggaagtgtgccacgcagataactggaagacacgccatccgcatagatagcaagatcccctgtgcctagactactcaagaaacaccaaggaggccaaacgtccaggagcagagtaaggggaaggtaatagaaaatgaggccagaaaggaaacaggggccacatcgcaaaaggactgagagccatcacaaagactttggcatctactctcagtgacactgaaaaccatcagaaggttttgcaaacaagtaatatgatttgacttacttgtctaaaggattcctttggctgatctgttgagagtagagttcaagggggaagggtagaagccaatgggccaattaggagaccattgcaatagtccaaacaagagttgatgctagcttggatcagggtgatagcagtggagatggtgagaagtggttacattttggacatatgttgaaggtaaagccaccaggatttcctgatgtgggagtatgagatgaagatatgaatcagcgataactccagaggttttggcctcagtgataggaaggatgcagttgtcaacaagtcagatgggtaaaactgcaggttgagaaggtttgggagagaaaaacgggagtcctttagactataccaagtttgagatatacttacacacttatatacctgtggaaatgtccttacatattcattaagtggaaaaaggtaacaagatggatttttttttcagttcagccatcaacactggatgagggagatgtgattttcatgccaaatatttgccatccctgtactaggcactgtctcatttattcctcaaaattacctgagaagtgggtattattacctggtcttacagataaggaaactgaggcttggatatagcaataatttgtccgtggtcatgtagccagtaaattacaaaattcaggtcttgactccaaatccaacacttttcccatacatgaatactctgttctggcaatatttcagtacagatactccacaactcctactcaactaagctcaaagtactactcggtctcttctaatcagagaattggagtcattctcttcctggttgggtcatctttacttcaaacctcaggccaaggctaagtcagtggccttttctgtcttgctcccatgttcccattggttcacagttacatcttactaggcaatatttcctggtctttgctctcagaaatacctacatcacatgtcatctcacatgcctagatacgccgcacttctttgctccccagaattgcttgcttgctttctcaccttattcacttcttccttccccacttctttggttctcagcattttcctttctgtcttgctgaccttctacatctgagtctctttctcactattggagccagctttagatacaataggaaccaggatccccatagattcaaattccccaaggaagtgatgcttccatcttccaccccaattaggtaattctgatagcagaggaaacaggactcttccacctggtctcttggcttctcacatcactgagttgccctcagagttcttggcttggtctccaaattgtctttacacaggggcagagtgcaaggactagaagggaacccagggataaactggagaccagaaatataaaataaccaccccaaaactacccagctagttgatggaaacctcagtctctcccttcccacttcttctgctgactatcctgccccatactgatgtcccgcatcatttggtcatcccagaccttgctaccatcaattaggcaatataagcagagtcatttacagagtctacagaccataacacacagcaaaggtgaaatacaaaacattgaggtgaaggatatttttcacagggggttgagccaagacatttgtccttaatctggatcttttttttttctgcaaacaggacaactgaggaacatacaagttaccaatcacagtcagctatttcagaatatgacctgtgagctccatctgacttgctctgtggaggatgcagatgacaatgtctcattcagatgggaggccttgggaaacacactttcaagtcagccaaacctcactgtctcctgggaccccaggatttccagtgaacaggactacacctgcatagcagagaatgctgtcagtaatttatccttctctgtctctgcccagaagctttgcgaaggtaacagcctgcctcaggtctgagagccttgagcagctatggggtttaacgcgtcctcacatcctacgtaatttccaatacagtggcccagtgggaggcagaaaatgctgctgggaggggacagatgccctctggagctctgcatctctcagtactcccagaggactctccttccttcctctccattccccaacccctcgtccaacctactcagaacccaaaatcaaaggcctgggaatgtaggattgctttctctccctaactccactgggccccaccctcccctgcctgccacataggactcccaccccagagcctccggctatagacaaacttacctagtccccaaagatggcctagaagaggctccacggaggctccaagaacagtgggcctcacttgatgtgtctcaaatgtcatttcttttttctcttttcagatgttaaaattcaatatacagataccaaaatgattctgtttatggtttctgggatatgcatagtcttcggtttcatcatactgctgttacttgttttgaggaaaagaagaggcaggtttcctttcttcctacttgtctcttctccaaggttccagtgattgagagtttggggcctctgattcccaaggatctcttgtggaagacaggaggagggagggaggctgcaaaccctggctcagctagtccactgagataatccctgggtgtgatcttgcacctgctaatatcctgagagaaatgtcctactgggaaaagtgggaccctgtctcagggctgcttgcccttccttttgggtcccctcccaccacatcccaacactcacggggttaggggtgaaatgcctctcccactgctgtcacacatttcaattttctggttttatttttcagattccctatctttgtctactcagcgaacacagggccccggtgagcattcagactcttaactctccatcataaagcagatgggaagagccaaatggaagagagagggggatggcagagggctggataatgacagaggaaggagtcagaatgtcattactcagaccacatgctgtgaggggagatgatctgtaatcatgggtcctacatggttcacaggcataggcatgtgaaccagtcactcacacagtttctcttggtgatatcaggttcattcaccaccctgctgatggagaaactaagtcccagtgaaagggatcatcccttgtcacccagcaagtccagggcacaggcaggattagagcatccaaggcacaaaaccaaactgtctgactgcatcattactgttcagccagggtctgggcaatggatagacacagtggaaagagaaaacatgatatagaaacacaaacacaggctctggactcagattggctttgggtctcatttcatgcatgagtgatgcatgacatcacttgcagaggaaaaggcataaggtttgaagtcagaagacgtgcatttgagttgctgtttcatcactgtctgtatggctttgcacaagtcagttaagttttctgagcctccagttcctcatctccaaaataatcaaatccgctgtagagacctctgaaaagcttaataatatcccaaatgtgaaataactggctccattatgtttgccaatgaggtgtctttagcccttccataggcagggctatttggtcccaggagcttcctgacccacatgtgaagcctgagggagactctgaagctttaggggacctcaacaccaccttctaccccaagagatgtggtcagaaatagaccacatgactgagaaggttcacccagagctccaaagactgtcaagaacgaatgatccctcaggaaaggagatgcttcaaacacctgcctatctggggacacagtgtgctctggggagggagaagtcctgggagagaagtcccagagtccttgtgccattgactgtgccttcctatgttaacagcagagtccgcaaggaacctagagtatgtttcagtgtctccaacgaacaacactgtgtatgcttcagtcactcattcaaacagggtgagtcttttcagctttatatgccattgttgtcagttttacagccattgttcacaaacttgtcaccataaccatctgactgaacaaatgaccactgaggggaggagaagacagccacagcgacaggggctgcaaagttatgcgctagaccactctggtgtctgcctttctcacccttaagggaatgtttattcataccctgccttacacagttctccaaccgcttgatgcatcagtaagtcttgtcccttcagcttaattacaagctgactgaaagtacaaattatgtcttcctctctcttgccctatatcctagcataatgatcagtaaatacttgctgaatgggtcagagttccactaagtttgaaagtttcctatggacgtagttccatagcaggtggctgacttctcactctgcatgtaggggtcttaggggagttcagaagtagtctctcaagaggggaagggggcacagtagaggccactaaaccatgagcaatggttcacccctcccctctcatctagcagcataacaggatggctggtcaagcatcagcaactcatctgtcatgtatcagcaactccccaccacccctaaataaaggacctgcaggtggcacatctctaaataataccatacattttgagaggccagttttctgaaaaataagccaggaaagcttagcattttcaaaatgatgtaagcaatgatctagctagaaatcttggattcccttcacctatatttgcaaagtatgatccttgatgacaggaagcaagaaggggtactctcacttgctcagacatttcttttgcctttgcaaattcctcctgaaaacaagtcaactcacactctgacaaatcaaaaaactaatttcccacaaattggttagctttctctttagcaaaaagaaaaaaaaaatgtgctttggagagtttgaggtttttttgttttttgttggtttgttttttgttttttggtttttttttttttttgagacagagtgtcactctgtcaccaagggctgagtgcagtagcacaatcacagctcactgcagcctcaacctcctcatgctcaggtgatccttttaccttggcctcccaagtagctgcgactacaggcgagcaccatcacatcaggataatttttctactttttgtagagacggggtttcaccatgttgcccaggctggtctcaaacttctgcgctcaagtgatccgcctgcctcgtcctcccaaagtgttgggtttacaggcatgagccactgtgcccagtagagatcttgataattctctaaatacttcttcattaatttaaagtgtcaaaatctttgagtaggttctttgagggccgtagggacttctgctattatttctgtaatgtgcattccaggcagagccattcttaaggccaagtgttcctattctaccaattccccatgcttgagaagaccccaatgacatgatgacaaggcagttagaattatagcaaaagatggagcaggcaaaatgggtagtttcagtcatagctagtaaaaatttgagacaaaacatataataaactatctggtatataagttttttcttaaaaatggaggaaggaaagtagagctggacaaaggacaagaatacttccttcccttcatacagcaaggctgcctttctctggctcttgagcccattggtttgctgcagtgttgctgttctgtttggggctcaggaaatgccactaaatcctcacaagtttgatagctagtcgtgcttggtcttccactgaacattccccagccttcctctggaagaactttgacatattctcttttttgtcacacagtctttcctaagaatatatctatgcattaatctctttgtctctgtgtaagccaaattggtatgattctttttacaggaaacagaaatctggacacctagagaaaatgatactatcacaatttactccacaattaatcattccaaagaggtaagcccacgattgctccatgtttttatattcttacctctctccacagacctatgatttttcaaataaagtaaaaataaaagggtcattttacagatgcacaaacagcagcagcatgcggaaagtctcaggacatcaccaaaacataatcaagaagttattttgtattaggatcaccatgcataactgagttttcaattacatgtttttaaatttaatcctgccctatgctatcaatatctctattatctgcctctctgtagtctccagtcctctctctgtagttatgaggggtgggctgaggttccagttccaattaacctacctcatcttcctctttttcccacagagtaaacccactttttccagggcaactgcccttgacaatgtcgtgtaagttgctgaaaggcctcagaggaattcgggaatgacacgtcttctgatcccatgagacagaacaaagaacaggaagcttggttcctgttgttcctggcaacagaatttgaatatctaggataggatgatcacctccagtccttcggacttaaacctgcctacctgagtcaaacacctaaggataacatcatttccagcatgtggttcaaataatattttccaatccacttcaggccaaaacatgctaaagataacacaccagcacattgactctctctttgataactaagcaaatggaattatggttgacagagagtttatgatccagaagacaaccacttctctccttttagaaagcagcaggattgacttattgagaaataatgcagtgtgttggttacatgtgtagtctctggagttggatgggcccatcctgatacaagttgagcatcccttgtctgaaatgcttgggattagaaatgtttcagatttcaattttttttcagattttggaatatttgcattatatttagcggttgagtatccaaatccaaaaatccaaaattcaaaatgctccaataagcatttcccttgagtttcattgatgtcgatgcagtgctcaaaatctcagattttggagcattttggatattggatttttggatttgggatgctcaacttgtacaatgtttattagacacatctcctgggacatactgcctaaccttttggagccttagtctcccagactgaaaaaggaagaggatggtattacatcagctccattgtttgagccaagaatctaagtcatccctgactccagtgtctttgtcaccaggccctttggactctacctcagaaatatttcttggaccttccacttctcctccaactccttgaccaccatcctgtatccaaccatcaccacctctaacctgaatcctaccttaagatcagaacagttgtcctcacttttgttcttgtccctctccaacccactctccacaagatggccagagtaatgtttttaatataaattggatccttcagtttcctgcttaaaaccctgcaggtttcccaatgcactcagaaagaaatccagtttccatggccctggatggtctggcccacctccagcctcagctagcattacccttctgacactctctatgtagcctccctgatcttctttcagctcctctattaaaggaaaagttctttatgttaattatttacatcttcctgcaggcccttcctctgcctgctggggtcctcctattctttaggtttaattttaaatatgtcacctcctaagagaaaccttcccagaccactctttctaaaatgaatcttctaggctgggcatggtggctcacacctgtaatccctgtactttgggaggccaaggggggagatcacttgaggtcaggagttcaagaccagcctggccaacttggtgaaaccccgtctttactaaaaatacaaaaaaattagccaggcgtggtggtgcacccctaaaatcccagctacttgagagactgaggcaggagaatcgcttgaacccaggaggtggaggttccagtgagccaaaatcatgccaatgtattccagtctgggtgacagagtgagactctgtctcaaaaaataaataaataaaataaaatgaaatagatcttat

SEQ ID NO: 167 - DNA, 2859 bp, Homo sapiens
attgttctcaacattctagctgctcttgctgcatttgctctggaattcttgtagagatattacttgtccttccaggctgttctttctgtagctcccttgttttctttttgtgatcatgttgcagatggctgggcagtgctcccaaaatgaatattttgacagtttgttgcatgcttgcataccttgtcaacttcgatgttcttctaatactcctcctctaacatgtcagcgttattgtaatgcaagtaagtaatattgcttgaacgattattcattggtgtgaactattctgtctatatggactgcttattcagagaatcaacataatgggcatgatggtgagttttcttgaatcaaaaagagaaaggaagcaaggcagtgattttaatgtttatggaaacaaagtaattatttggaactgaacttgatatgattcagcactattagcaacatagattttttttaaaaatcagctcttctaattaagtgatatttagaatttaaaagtcaatgttcattaattaaggtgattgaatggaaataatccatacttgattattttgctatcaaaacaatccataattcattattttagcaaaataatcaagtatgacagccgggtgcggtggatggctcacacctgtaatcccagcactttgggaggccgaggtgggtgaatcacctgaggtcggcagtttgaggccagcctggccaacctggtgaaaccctgtctctactaaaaatacaaaaaattagctgggcatggtggcacaggtctgtaatcccagctactcgggaggctgaggcaggagaattgtttgaacttgggaggtggaggttgcagtgagccgagatcgcgccactgcactctagcctgggcaacagagcaagactttgtctcaaaataaataaataaataataacaataaagtatgtgaatattatgttatcagctcattatctgtctgatgttcttttcataaaggtgtgaccaattcagtgaaaggaacgaatgcgattctctggacctgtttgggactgagcttaataatttctttggcagttttcgtgctaatgtttttgctaaggaagataaactctgaaccattaaaggacgagtttaaaaacacaggttggtttgatggtgaatctttgaaatctatttccaggggatggctattgtgagtttcagttccttttctttttttagcgttgactatttcacttcgttacagccctttcgaatgtgttagaacattgttacattaaatgaacttggtagaggtgagccatcttcattctgattttgacaccttggcagattttctacaatgtcagtcttctccaggattcttccactgttaattactctattgaaagtactaaggctttcttgggaaacatcagtctctttgactaaagttagcacatcgattaaatgccacattatcagaaactcctagccaggtctgctactgtcaggaaaagcatatttgtcaagatctatggtcatgtttttatacaaatataggtgttctttgcttgagtgaacattttactactgaaaaatgttagaaatgaataaccagttgctcctgaattatttgaggaatcatctaaaaaataattatttttaagcaatagagaaccagtcccagaaaaatgaatgttctacttaagtgcctcttaagataaaaatacttctgcagcacctttgctcatgattggattcccaagcatgtacagccactgccctatttctgtatgcatttatttatttatttatttatttatttatttatttatttagagatggagtctcgctctgtggcccaggctggagtgcagtggcgtgatctcaactcactgcagcctctgcctcttgggttcaaacaattctcccatctcagcctcctgagtaactgggactataggtatgtgccatcacctccgactaatttttgtactttttggtagagacagggtttcatcatgttggccaggatggtctcaagctcctgaccacaagtgatctgcccgcctcagcttcccaaagtgctgggattacaggcgtgagccacagggcccagcacatactcattcttttttactgaaaagatctgtttcaagctgggtgtggtggcatggagctgtagtcccgactgctctgtaggctaacgtgggaggattgcttgagcccaggagtttgaatgcagcctgggcaacacagtaagaccccacctctaaaaaatgaaaaaatctctctcacattgctttgagtcccgatgtgtactgctaagactctcatgaccacattctctgtgaagtttgggttaatgtttccgtttctacataattaggatcaggtctcctgggcatggctaacattgacctggaaaagagcaggactggtgatgaaattattcttccgagaggcctcgagtacacggtggaagaatgcacctgtgaagactgcatcaagagcaaaccgaaggtcgactctgaccattgctttccactcccagctatggaggaaggcgcaaccattcttgtcaccacgaaaacgaatgactattgcaagagcctgccagctgctttgagtgctacggagatagagaaatcaatttctgctaggtaattaaccatttcgactcgagcagtgccactttaaaaatcttttgtcagaatagatgatgtgtcagatctctttaggatgactgtatttttcagttgccgatacagctttttgtcctctaactgtggaaactctttatgttagatatatttctctaggttactgttgggagcttaatggtagaaacttccttggtttcatgattaaactcttttttttcctga

SEQ ID NO: 168 - protein, 355 aa, Homo sapiens; identical to SEQ ID NO: 60

SEQ ID NO: 169 - protein, 240 aa, Homo sapiens
MSGGWMAQVGAWRTGALGLALLLLLGLGLGLEAAASPLSTPTSAQAAGIEPCTQKGQCPPPPGLPCPCTGVSDCSGGTDKKLRNCSRLACLAGELRCTLSDDCIPLTWRCDGHPDCPDSSDELGCGTNEILPEGDATTMGPPVTLESVTSLRNATTMGPPVTLESVPSVGNATSSSAGDQSGSPTAYGVIAAAAVLSASLVTATLLLLSWLRAQERLRPLGLLVAMKESLLLSEQKTSLP

SEQ ID NO: 170 - protein, 282 aa, Homo sapiens; identical to SEQ ID NO: 56

SEQ ID NO: 171 - protein, 282 aa, Homo sapiens; identical to SEQ ID NO: 56

SEQ ID NO: 172 - protein, 742 aa, Homo sapiens
MLLWLLLLILTPGREQSGVAPKAVLLLNPPWSTAFKGEKVALICSSISHSLAQGDTYWYHDEKLLKIKHDKIQITEPGNYQCKTRGSSLSDAVHVEFSPDWLILQALHPVFEGDNVILRCQGKDNKNTHQKVYYKDGKQLPNSYNLEKITVNSVSRDNSKYHCTAYRKFYILDIEVTSKPLNIQVQELFLHPVLRASSSTPIEGSPMTLTCETQLSPQRPDVQLQFSLFRDSQTLGLGWSRSPRLQIPAMWTEDSGSYWCEVETVTHSIKKRSLRSQIRVQRVPVSNVNLEIRPTGGQLIEGENMVLICSVAQGSGTVTFSWHKEGRVRSLGRKTQRSLLAELHVLTVKESDAGRYYCAADNVHSPILSTWIRVTVRIPVSHPVLTFRAPRAHTVVGDLLELHCESLRGSPPILYRFYHEDVTLGNSSAPSGGGASFNLSLTAEHSGNYSCDADNGLGAQHSHGVSLRVTVPVSRPVLTLRAPGAQAVVGDLLELHCESLRGSFPILYWFYHEDDTLGNISAHSGGGASFNLSLTTEHSGNYSCEADNGLGAQHSKVVTLNVTGTSRNRTGLTAAGITGLVLSILVLAAAAALLHYARARRKPGGLSATGTSSHSPSECQEPSSSRPSRIDPQEPTHSKPLAPMELEPMYSNVNPGDSNPIYSQIWSIQHTKENSANCPMMHQEHEELTVLYSELKKTHPDDSAGEASSRGRAHEEDDEENYENILNPRKNKVQDFPCLCNT

SEQ ID NO: 173 - protein, 734 aa, Homo sapiens; identical to SEQ ID NO: 57

SEQ ID NO: 174 - protein, 489 aa, Homo sapiens; identical to SEQ ID NO: 79

SEQ ID NO: 175 - protein, 479 aa, Homo sapiens
MLLKSPENSLLQFQFKYGVPTPTNVTIESYNMNPIVYWEYQIMPQVPVFTVEVKNYGVKNSEWIDACINISHHYCNISDHVGDPSNSLWVRVKARVGQKESAYAKSEEFAVCRDGKIGPPKLDIRKEEKQIMIDIFHPSVFVNGDEQEVDYDPETTCYIRVYNVYVRMNGSEIQYKILTQKEDDCDEIQCQLAIPVSSLNSQYCVSAEGVLHVWGVTTEKSKEVCITIFNSSIKGSLWIPVVAALLLFLVLSLVFICFYIKKINPLKEKSIILPKSLISVVRSATLETKPESKYVSLITSYQPFSLEKEVVCEEPLSPATVPGMHTEDNPGKVEHTEELSSITEVVTTEENIPDVVPGSHLTPIERESSSPLSSNQSEPGSIALNSYHSRNCSESDHSRNGFDTDSSCLESHSSLSDSEFPPNNKGEIKTEGQELITVIKAPTSFGYDKPHVLVDLLVDDSGKESLIGYRPTEDSKEFS

SEQ ID NO: 176 - protein, 448 aa, Homo sapiens
MNPIVYWEYQIMPQVPVFTVEVKNYGVKNSEWIDACINISHHYCNISDHVGDPSNSLWVRVKARVGQKESAYAKSEEFAVCRDGKIGPPKLDIRKEEKQIMIDIFHPSVFVNGDEQEVDYDPETTCYIRVYNVYVRMNGSEIQYKILTQKEDDCDEIQCQLAIPVSSLNSQYCVSAEGVLHVWGVTTEKSKEVCITIFNSSIKGSLWIPVVAALLLFLVLSLVFICFYIKKINPLKEKSIILPKSLISVVRSATLETKPESKYVSLITSYQPFSLEKEVVCEEPLSPATVPGMHTEDNPGKVEHTEELSSITEVVTTEENIPDVVPGSHLTPIERESSSPLSSNQSEPGSIALNSYHSRNCSESDHSRNGFDTDSSCLESHSSLSDSEFPPNNKGEIKTEGQELITVIKAPTSFGYDKPHVLVDLLVDDSGKESLIGYRPTEDSKEFS

SEQ ID NO: 177 - protein, 660 aa, Homo sapiens
MEPLVTWVVPLLFLFLLSRQGAACRTSECCFQDPPYPDADSGSASGPRDLRCYRISSDRYECSWQYEGPTAGVSHFLRCCLSSGRCCYFAAGSATRLQFSDQAGVSVLYTVTLWVESWARNQTEKSPEVTLQLYNSVKYEPPLGDIKVSKLAGQLRMEWETPDNQVGAEVQFRHRTPSSPWKLGDCGPQDDDTESCLCPLEMNVAQEFQLRRRQLGSQGSSWSKWSSPVCVPPENPPQPQVRFSVEQLGQDGRRRLTLKEQPTQLELPEGCQGLAPGTEVTYRLQLHMLSCPCKAKATRTLHLGKMPYLSGAAYNVAVISSNQFGPGLNQTWHIPADTHTEPVALNISVGTNGTTMYWPARAQSMTYCIEWQPVGQDGGLATCSLTAPQDPDPAGMATYSWSRESGAMGQEKCYYITIFASAHPEKLTLWSTVLSTYHFGGNASAAGTPHHVSVKNHSLDSVSVDWAPSLLSTCPGVLKEYVVRCRDEDSKQVSEHPVQPTETQVTLSGLRAGVAYTVQVRADTAWLRGVWSQPQRFSIEVQVSDWLIFFASLGSFLSILLVGVLGYLGLNRAARHLCPPLPTPCASSAIEFPGGKETWQWINPVDFQEEASLQEALVVEMSWDKGERTEPLEKTELPEGAPELALDTELSLEDGDRCDR

SEQ ID NO: 178 - protein, 702 aa, Homo sapiens
MFVGLFSLLSFNVFRSGDGVAEPRRWQRGSPGAVGLYVDPMEPLVTWVVPLLFLFLLSRQGAACRTSECCFQDPPYPDADSGSASGPRDLRCYRISSDRYECSWQYEGPTAGVSHFLRCCLSSGRCCYFAAGSATRLQFSDQAGVSVLYTVTLWVESWARNQTEKSPEVTLQLYNSVKYEPPLGDIKVSKLAGQLRMEWETPDNQVGAEVQFRHRTPSSPWKLGDCGPQDDDTESCLCPLEMNVAQEFQLRRRQLGSQGSSWSKWSSPVCVPPENPPQPQVRFSVEQLGQDGRRRLTLKEQPTQLELPEGCQGLAPGTEVTYRLQLHMLSCPCKAKATRTLHLGKMPYLSGAAYNVAVISSNQFGPGLNQTWHIPADTHTEPVALNISVGTNGTTMYWPARAQSMTYCIEWQPVGQDGGLATCSLTAPQDPDPAGMATYSWSRESGAMGQEKCYYITIFASAHPEKLTLWSTVLSTYHFGGNASAAGTPHHVSVKNHSLDSVSVDWAPSLLSTCPGVLKEYVVRCRDEDSKQVSEHPVQPTETQVTLSGLRAGVAYTVQVRADTAWLRGVWSQPQRFSIEVQVSDWLIFFASLGSFLSILLVGVLGYLGLNRAARHLCPPLPTPCASSAIEFPGGKETWQWINPVDFQEEASLQEALVVEMSWDKGERTEPLEKTELPEGAPELALDTELSLEDGDRCKAKM

SEQ ID NO: 179 - protein, 714 aa, Homo sapiens
MFVGLFSLLSFNVFRSGDGVAEPRRWQRGSPGAVGLYVDPMEPLVTWVVPLLFLFLLSRQGAACRTSECCFQDPPYPDADSGSASGPRDLRCYRISSDRYECSWQYEGPTAGVSHFLRCCLSSGRCCYFAAGSATRLQFSDQAGVSVLYTVTLWVESWARNQTEKSPEVTLQLYNSVKYEPPLGDIKVSKLAGQLRMEWETPDNQVGAEVQFRHRTPSSPWKLGDCGPQDDDTESCLCPLEMNVAQEFQLRRRQLGSQGSSWSKWSSPVCVPPENPPQPQVRFSVEQLGQDGRRRLTLKEQPTQLELPEGCQGLAPGTEVTYRLQLHMLSCPCKAKATRTLHLGKMPYLSGAAYNVAVISSNQFGPGLNQTWHIPADTHTEPVALNISVGTNGTTMYWPARAQSMTYCIEWQPVGQDGGLATCSLTAPQDPDPAGMATYSWSRESGAMGQEKCYYITIFASAHPEKLTLWSTVLSTYHFGGNASAAGTPHHVSVKNHSLDSVSVDWAPSLLSTCPGVLKEYVVRCRDEDSKQVSEHPVQPTETQVTLSGLRAGVAYTVQVRADTAWLRGVWSQPQRFSIEVQVSDWLIFFASLGSFLSILLVGVLGYLGLNRAARHLCPPLPTPCASSAIEFPGGKETWQWINPVDFQEEASLQEALVVEMSWDKGERTEPLEKTELPEGAPELALDTELSLEDGDRCKAKTRRATISITTAGY

SEQ ID NO: 180 - protein, 745 aa, Homo sapiens
MFVGLFSLLSFNVFRSGDGVAEPRRWQRGSPGAVGLYVDPMEPLVTWVVPLLFLFLLSRQGAACRTSECCFQDPPYPDADSGSLPGSASGPRDLRCYRISSDRYECSWQYEGPTAGVSHFLRCCLSSGRCCYFAAGSATRLQFSDQAGVSVLYTVTLWVESWARNQTEKSPEVTLQLYNSVKYEPPLGDIKVSKLAGQLRMEWETPDNQVGAEVQFRHRTPSSPWKLGDCGPQDDDTESCLCPLEMNVAQEFQLRRRQLGSQGSSWSKWSSPVCVPPVGLVLIAENPPQPQVRFSVEQLGQDGRRRLTLKEQPTQLELPEGCQGLAPGTEVTYRLQLHMLSCPCKAKATRTLHLGKMPYLSGAAYNVAVISSNQFGPGLNQTWHIPADTHTEPVALNISVGTNGTTMYWPARAQSMTYCIEWQPVGQDGGLATCSLTAPQDPDPAGMATYSWSRESGAMGQEKCYYITIFASAHPEKLTLWSTVLSTYHFGGNASAAGTPHHVSVKNHSLDSVSVDWAPSLLSTCPGVLKEYVVRCRDEDSKQVSEHPVQPTETQVTLSGLRAGVAYTVQVRADTAWLRGVWSQPQRFSIEVQVSDWLIFFASLGSFLSILLVGVLGYLGLNRAARHLCPPLPTPCASSAIEFPGGKETWQWINPVDFQEEASLQEALVVEMSWDKGERTEPLEKTELPEGAPELALDTELSLEDGDRHEERLSQSQRLVIKHLWHTQPIPSTHMIPYQIPTTTP

SEQ ID NO: 181 - protein, 741 aa, Homo sapiens
MFVGLFSLLSFNVFRSGDGVAEPRRWQRGSPGAVGLYVDPMEPLVTWVVPLLFLFLLSRQGAACRTSECCFQDPPYPDADSGSASGPRDLRCYRISSDRYECSWQYEGPTAGVSHFLRCCLSSGRCCYFAAGSATRLQFSDQAGVSVLYTVTLWVESWARNQTEKSPEVTLQLYNSVKYEPPLGDIKVSKLAGQLRMEWETPDNQVGAEVQFRHRTPSSPWKLGDCGPQDDDTESCLCPLEMNVAQEFQLRRRQLGSQGSSWSKWSSPVCVPPVGLVLIAENPPQPQVRFSVEQLGQDGRRRLTLKEQPTQLELPEGCQGLAPGTEVTYRLQLHMLSCPCKAKATRTLHLGKMPYLSGAAYNVAVISSNQFGPGLNQTWHIPADTHTEPVALNISVGTNGTTMYWPARAQSMTYCIEWQPVGQDGGLATCSLTAPQDPDPAGMATYSWSRESGAMGQEKCYYITIFASAHPEKLTLWSTVLSTYHFGGNASAAGTPHHVSVKNHSLDSVSVDWAPSLLSTCPGVLKEYVVRCRDEDSKQVSEHPVQPTETQVTLSGLRAGVAYTVQVRADTAWLRGVWSQPQRFSIEVQVSDWLIFFASLGSFLSILLVGVLGYLGLNRAARHLCPPLPTPCASSAIEFPGGKETWQWINPVDFQEEASLQEALVVEMSWDKGERTEPLEKTELPEGAPELALDTELSLEDGDRHEERLSQSQRLVIKHLWHTQPIPSTHMIPYQIPTTTP

SEQ ID NO: 182 - protein, 738 aa, Homo sapiens
MFVGLFSLLSFNVFRSGDGVAEPRRWQRGSPGAVGLYVDPMEPLVTWVVPLLFLFLLSRQGAACRTSECCFQDPPYPDADSGSLPGSASGPRDLRCYRISSDRYECSWQYEGPTAGVSHFLRCCLSSGRCCYFAAGSATRLQFSDQAGVSVLYTVTLWVESWARNQTEKSPEVTLQLYNSVKYEPPLGDIKVSKLAGQLRMEWETPDNQVGAEVQFRHRTPSSPWKLGDCGPQDDDTESCLCPLEMNVAQEFQLRRRQLGSQGSSWSKWSSPVCVPPENPPQPQVRFSVEQLGQDGRRRLTLKEQPTQLELPEGCQGLAPGTEVTYRLQLHMLSCPCKAKATRTLHLGKMPYLSGAAYNVAVISSNQFGPGLNQTWHIPADTHTEPVALNISVGTNGTTMYWPARAQSMTYCIEWQPVGQDGGLATCSLTAPQDPDPAGMATYSWSRESGAMGQEKCYYITIFASAHPEKLTLWSTVLSTYHFGGNASAAGTPHHVSVKNHSLDSVSVDWAPSLLSTCPGVLKEYVVRCRDEDSKQVSEHPVQPTETQVTLSGLRAGVAYTVQVRADTAWLRGVWSQPQRFSIEVQVSDWLIFFASLGSFLSILLVGVLGYLGLNRAARHLCPPLPTPCASSAIEFPGGKETWQWINPVDFQEEASLQEALVVEMSWDKGERTEPLEKTELPEGAPELALDTELSLEDGDRHEERLSQSQRLVIKHLWHTQPIPSTHMIPYQIPTTTP

SEQ ID NO: 183 - protein, 734 aa, Homo sapiens
MFVGLFSLLSFNVFRSGDGVAEPRRWQRGSPGAVGLYVDPMEPLVTWVVPLLFLFLLSRQGAACRTSECCFQDPPYPDADSGSASGPRDLRCYRISSDRYECSWQYEGPTAGVSHFLRCCLSSGRCCYFAAGSATRLQFSDQAGVSVLYTVTLWVESWARNQTEKSPEVTLQLYNSVKYEPPLGDIKVSKLAGQLRMEWETPDNQVGAEVQFRHRTPSSPWKLGDCGPQDDDTESCLCPLEMNVAQEFQLRRRQLGSQGSSWSKWSSPVCVPPENPPQPQVRFSVEQLGQDGRRRLTLKEQPTQLELPEGCQGLAPGTEVTYRLQLHMLSCPCKAKATRTLHLGKMPYLSGAAYNVAVISSNQFGPGLNQTWHIPADTHTEPVALNISVGTNGTTMYWPARAQSMTYCIEWQPVGQDGGLATCSLTAPQDPDPAGMATYSWSRESGAMGQEKCYYITIFASAHPEKLTLWSTVLSTYHFGGNASAAGTPHHVSVKNHSLDSVSVDWAPSLLSTCPGVLKEYVVRCRDEDSKQVSEHPVQPTETQVTLSGLRAGVAYTVQVRADTAWLRGVWSQPQRFSIEVQVSDWLIFFASLGSFLSILLVGVLGYLGLNRAARHLCPPLPTPCASSAIEFPGGKETWQWINPVDFQEEASLQEALVVEMSWDKGERTEPLEKTELPEGAPELALDTELSLEDGDRHEERLSQSQRLVIKHLWHTQPIPSTHMIPYQIPTTTP

SEQ ID NO: 184 - protein, 725 aa, Homo sapiens
MFVGLFSLLSFNVFRSGDGVAEPRRWQRGSPGAVGLYVDPMEPLVTWVVPLLFLFLLSRQGAACRTSECCFQDPPYPDADSGSLPGSASGPRDLRCYRISSDRYECSWQYEGPTAGVSHFLRCCLSSGRCCYFAAGSATRLQFSDQAGVSVLYTVTLWVESWARNQTEKSPEVTLQLYNSVKYEPPLGDIKVSKLAGQLRMEWETPDNQVGAEVQFRHRTPSSPWKLGDCGPQDDDTESCLCPLEMNVAQEFQLRRRQLGSQGSSWSKWSSPVCVPPVGLVLIAENPPQPQVRFSVEQLGQDGRRRLTLKEQPTQLELPEGCQGLAPGTEVTYRLQLHMLSCPCKAKATRTLHLGKMPYLSGAAYNVAVISSNQFGPGLNQTWHIPADTHTEPVALNISVGTNGTTMYWPARAQSMTYCIEWQPVGQDGGLATCSLTAPQDPDPAGMATYSWSRESGAMGQEKCYYITIFASAHPEKLTLWSTVLSTYHFGGNASAAGTPHHVSVKNHSLDSVSVDWAPSLLSTCPGVLKEYVVRCRDEDSKQVSEHPVQPTETQVTLSGLRAGVAYTVQVRADTAWLRGVWSQPQRFSIEVQVSDWLIFFASLGSFLSILLVGVLGYLGLNRAARHLCPPLPTPCASSAIEFPGGKETWQWINPVDFQEEASLQEALVVEMSWDKGERTEPLEKTELPEGAPELALDTELSLEDGDRCKAKTRRATISITTAGY

SEQ ID NO: 185 - protein, 713 aa, Homo sapiens
MFVGLFSLLSFNVFRSGDGVAEPRRWQRGSPGAVGLYVDPMEPLVTWVVPLLFLFLLSRQGAACRTSECCFQDPPYPDADSGSLPGSASGPRDLRCYRISSDRYECSWQYEGPTAGVSHFLRCCLSSGRCCYFAAGSATRLQFSDQAGVSVLYTVTLWVESWARNQTEKSPEVTLQLYNSVKYEPPLGDIKVSKLAGQLRMEWETPDNQVGAEVQFRHRTPSSPWKLGDCGPQDDDTESCLCPLEMNVAQEFQLRRRQLGSQGSSWSKWSSPVCVPPVGLVLIAENPPQPQVRFSVEQLGQDGRRRLTLKEQPTQLELPEGCQGLAPGTEVTYRLQLHMLSCPCKAKATRTLHLGKMPYLSGAAYNVAVISSNQFGPGLNQTWHIPADTHTEPVALNISVGTNGTTMYWPARAQSMTYCIEWQPVGQDGGLATCSLTAPQDPDPAGMATYSWSRESGAMGQEKCYYITIFASAHPEKLTLWSTVLSTYHFGGNASAAGTPHHVSVKNHSLDSVSVDWAPSLLSTCPGVLKEYVVRCRDEDSKQVSEHPVQPTETQVTLSGLRAGVAYTVQVRADTAWLRGVWSQPQRFSIEVQVSDWLIFFASLGSFLSILLVGVLGYLGLNRAARHLCPPLPTPCASSAIEFPGGKETWQWINPVDFQEEASLQEALVVEMSWDKGERTEPLEKTELPEGAPELALDTELSLEDGDRCKAKM

SEQ ID NO: 186 - protein, 711 aa, Homo sapiens
MFVGLFSLLSFNVFRSGDGVAEPRRWQRGSPGAVGLYVDPMEPLVTWVVPLLFLFLLSRQGAACRTSECCFQDPPYPDADSGSLPGSASGPRDLRCYRISSDRYECSWQYEGPTAGVSHFLRCCLSSGRCCYFAAGSATRLQFSDQAGVSVLYTVTLWVESWARNQTEKSPEVTLQLYNSVKYEPPLGDIKVSKLAGQLRMEWETPDNQVGAEVQFRHRTPSSPWKLGDCGPQDDDTESCLCPLEMNVAQEFQLRRRQLGSQGSSWSKWSSPVCVPPVGLVLIAENPPQPQVRFSVEQLGQDGRRRLTLKEQPTQLELPEGCQGLAPGTEVTYRLQLHMLSCPCKAKATRTLHLGKMPYLSGAAYNVAVISSNQFGPGLNQTWHIPADTHTEPVALNISVGTNGTTMYWPARAQSMTYCIEWQPVGQDGGLATCSLTAPQDPDPAGMATYSWSRESGAMGQEKCYYITIFASAHPEKLTLWSTVLSTYHFGGNASAAGTPHHVSVKNHSLDSVSVDWAPSLLSTCPGVLKEYVVRCRDEDSKQVSEHPVQPTETQVTLSGLRAGVAYTVQVRADTAWLRGVWSQPQRFSIEVQVSDWLIFFASLGSFLSILLVGVLGYLGLNRAARHLCPPLPTPCASSAIEFPGGKETWQWINPVDFQEEASLQEALVVEMSWDKGERTEPLEKTELPEGAPELALDTELSLEDGDRCDR

SEQ ID NO: 187 - protein, 705 aa, Homo sapiens
MEPLVTWVVPLLFLFLLSRQGAACRTSECCFQDPPYPDADSGSLPGSASGPRDLRCYRISSDRYECSWQYEGPTAGVSHFLRCCLSSGRCCYFAAGSATRLQFSDQAGVSVLYTVTLWVESWARNQTEKSPEVTLQLYNSVKYEPPLGDIKVSKLAGQLRMEWETPDNQVGAEVQFRHRTPSSPWKLGDCGPQDDDTESCLCPLEMNVAQEFQLRRRQLGSQGSSWSKWSSPVCVPPVGLVLIAENPPQPQVRFSVEQLGQDGRRRLTLKEQPTQLELPEGCQGLAPGTEVTYRLQLHMLSCPCKAKATRTLHLGKMPYLSGAAYNVAVISSNQFGPGLNQTWHIPADTHTEPVALNISVGTNGTTMYWPARAQSMTYCIEWQPVGQDGGLATCSLTAPQDPDPAGMATYSWSRESGAMGQEKCYYITIFASAHPEKLTLWSTVLSTYHFGGNASAAGTPHHVSVKNHSLDSVSVDWAPSLLSTCPGVLKEYVVRCRDEDSKQVSEHPVQPTETQVTLSGLRAGVAYTVQVRADTAWLRGVWSQPQRFSIEVQVSDWLIFFASLGSFLSILLVGVLGYLGLNRAARHLCPPLPTPCASSAIEFPGGKETWQWINPVDFQEEASLQEALVVEMSWDKGERTEPLEKTELPEGAPELALDTELSLEDGDRHEERLSQSQRLVIKHLWHTQPIPSTHMIPYQIPTTTP

SEQ ID NO: 188 - protein, 1032 aa, Homo sapiens [sequence omitted]

SEQ ID NO: 189 - protein, 195 aa, Homo sapiens
MAWEARREPGPRRAAVRETVMLLLCLGVPTGRPYNVDTESALLYQGPHNTLFGYSVVLHSHGANRWLLVGAPTANWLANASVINPGAIYRCRIGKNPGQTCEQLQLGSPNGEPCGKTCLEERDNQWLGVTLSRQPGENGSIVTCGHRWKNIFYIKNENKLPTGGCYGVPPDLRTELSKRIAPCYQGSISKYRART

SEQ ID NO: 190 - protein, 382 aa, Homo sapiens
MRSHFLQWALATSRNKDQITNIFSGFAGLLAILLVVAVFCILWNWNKRKKRQVPYLRVTVMPLLTLPQTRQRAKNIYDILPWRQEDLGRHESRSMRIFSTESLLSRNSESPEHVPSQAGNAFQEHTAHIHATEYAVGIYDNAMVPQMCGNLTPSAHCINVRASRDCASISSEDSHDYVNVPTAEEIAETLASTKSPSRNLFVLPSTQKLEFTEERDEGCGDAGDCTSLYSPGAEDSDSLSNGEGSSQISNDYVNMTGLDLSAIQERQLWVAFQCCRDYENVPAADPSGSQQQAEKDVPSSNIGHVEDKTDDPGTHVQCVKRTFLASGDYADFQPFTQSEDSQMKHREEMSNEDSSDYENVLTAKLGGRDSEQGPGTQLLPDE

SEQ ID NO: 191 - protein, 322 aa, Homo sapiens
MPLLTLPQTRQRAKNIYDILPWRQEDLGRHESRSMRIFSTESLLSRNSESPEHVPSQAGNAFQEHTAHIHATEYAVGIYDNAMVPQMCGNLTPSAHCINVRASRDCASISSEDSHDYVNVPTAEEIAETLASTKSPSRNLFVLPSTQKLEFTEERDEGCGDAGDCTSLYSPGAEDSDSLSNGEGSSQISNDYVNMTGLDLSAIQERQLWVAFQCCRDYENVPAADPSGSQQQAEKDVPSSNIGHVEDKTDDPGTHVQCVKRTFLASGDYADFQPFTQSEDSQMKHREEMSNEDSSDYENVLTAKLGGRDSEQGPGTQLLPDE

SEQ ID NO: 192 - protein, 398 aa, Homo sapiens
MDGVTPTLSTIRGRTLESSTLHVTPRSLDRNKDQITNIFSGFAGLLAILLVVAVFCILWNWNKRKKRQVPYLRVTVMPLLTLPQTRQRAKNIYDILPWRQEDLGRHESRSMRIFSTESLLSRNSESPEHVPSQAGNAFQEHTAHIHATEYAVGIYDNAMVPQMCGNLTPSAHCINVRASRDCASISSEDSHDYVNVPTAEEIAETLASTKSPSRNLFVLPSTQKLEFTEERDEGCGDAGDCTSLYSPGAEDSDSLSNGEGSSQISNDYVNMTGLDLSAIQERQLWVAFQCCRDYENVPAADPSGSQQQAEKDVPSSNIGHVEDKTDDPGTHVQCVKRTFLASGDYADFQPFTQSEDSQMKHREEMSNEDSSDYENVLTAKLGGRDSEQGPGTQLLPDE

SEQ ID NO: 193 - protein, 398 aa, Homo sapiens; identical to SEQ ID NO: 192

SEQ ID NO: 194 - protein, 490 aa, Homo sapiens
MEQPHDEKDPASKRPHPVCLFVLPALRTHPSAQLGPLGGDAMIPTFTALLCLGLSLGPRTHMQAGPLPKPTLWAEPGSVISWGNSVTIWCQGTLEAREYRLDKEESPAPWDRQNPLEPKNKARFSIPSMTEDYAGRYRCYYRSPVGWSQPSDPLELVMTGAYSKPTLSALPSPLVTSGKSVTLLCQSRSPMDTFLLIKERAAHPLLHLRSEHGAQQHQAEFPMSPVTSVHGGTYRCFSSHGFSHYLLSHPSDPLELIVSGSLEGPRPSPTRSVSTAAGPEDQPLMPTGSVPHSGLRRHWEVLIGVLVVSILLLSLLLFLLLQHWRQGKHRTLAQRQADFQRPPGAAEPEPKDGGLQRRSSPAADVQGENFSGAAVKNTQPEDGVEMDTRQSPHDEDPQAVTYAKVKHSRPRREMASPPSPLSGEFLDTKDRQAEEDRQMDTEAAASEAPQDVTYARLHSFTLRQKATEPPPSQEGASPAEPSVYATLAIH

SEQ ID NO: 195 - protein, 489 aa, Homo sapiens
MEQPHDEKDPASKRPHPVCLFVLPALRTHPSAQLGPLGGDAMIPTFTALLCLGLSLGPRTHMQAGPLPKPTLWAEPGSVISWGNSVTIWCQGTLEAREYRLDKEESPAPWDRQNPLEPKNKARFSIPSMTEDYAGRYRCYYRSPVGWSQPSDPLELVMTGAYSKPTLSALPSPLVTSGKSVTLLCQSRSPMDTFLLIKERAAHPLLHLRSEHGAQQHQAEFPMSPVTSVHGGTYRCFSSHGFSHYLLSHPSDPLELIVSGSLEGPRPSPTRSVSTAGPEDQPLMPTGSVPHSGLRRHWEVLIGVLVVSILLLSLLLFLLLQHWRQGKHRTLAQRQADFQRPPGAAEPEPKDGGLQRRSSPAADVQGENFSGAAVKNTQPEDGVEMDTRQSPHDEDPQAVTYAKVKHSRPRREMASPPSPLSGEFLDTKDRQAEEDRQMDTEAAASEAPQDVTYARLHSFTLRQKATEPPPSQEGASPAEPSVYATLAIH

SEQ ID NO: 196 - protein, 487 aa, Homo sapiens
MEQPHDEKDPASKRPHPVCLFVLPALRTHPSAQLGPLGGDAMIPTFTALLCLGLSLGPRTHMQAGPLPKPTLWAEPGSVISWGNSVTIWCQGTLEAREYRLDKEESPAPWDRQNPLEPKNKARFSIPSMTEDYAGRYRCYYRSPVGWSQPSDPLELVMTGAYSKPTLSALPSPLVTSGKSVTLLCQSRSPMDTFLLIKERAAHPLLHLRSEHGAQQHQAEFPMSPVTSVHGGTYRCFSSHGFSHYLLSHPSDPLELIVSGSLEGPRPSPTRSVSTAGPEDQPLMPTGSVPHSGLRRHWEVLIGVLVVSILLLSLLLFLLLQHWRQGKHRTLAQRQADFQRPPGAAEPEPKDGGLQRRSSPAADVQGENFCAAVKNTQPEDGVEMDTRSPHDEDPQAVTYAKVKHSRPRREMASPPSPLSGEFLDTKDRQAEEDRQMDTEAAASEAPQDVTYARLHSFTLRQKATEPPPSQEGASPAEPSVYATLAIH

SEQ ID NO: 197 - protein, 488 aa, Homo sapiens
MEQPHDEKDPASKRPHPVCLFVLPALRTHPSAQLGPLGGDAMIPTFTALLCLGLSLGPRTHMQAGPLPKPTLWAEPGSVISWGNSVTIWCQGTLEAREYRLDKEESPAPWDRQNPLEPKNKARFSIPSMTEDYAGRYRCYYRSPVGWSQPSDPLELVMTGAYSKPTLSALPSPLVTSGKSVTLLCQSRSPMDTFLLIKERAAHPLLHLRSEHGAQQHQAEFPMSPVTSVHGGTYRCFSSHGFSHYLLSHPSDPLELIVSGSLEGPRPSPTRSVSTAGPEDQPLMPTGSVPHSGLRRHWEVLIGVLVVSILLLSLLLFLLLQHWRQGKHRTLAQRQADFQRPPGAAEPEPKDGGLQRRSSPAADVQGENFCAAVKNTQPEDGVEMDTRQSPHDEDPQAVTYAKVKHSRPRREMASPPSPLSGEFLDTKDRQAEEDRQMDTEAAASEAPQDVTYARLHSFTLRQKATEPPPSQEGASPAEPSVYATLAIH

SEQ ID NO: 198 - protein, 858 aa, Homo sapiens
MFTLAEVASLNDIQPTYRILKPWWDVFMDYLAVVMLMVAIFAGTMQLTKDQVVCLPVLPSPVNSKAHTPPGNAEVTTNIPKMEAATNQDQDGRTTNDISFGTSAVTPDIPLRATYPRTDFALPNQEAKKEKKDPTGRKTNLDFQQYVFINQMCYHLALPWYSKYFPYLALIHTIILMVSSNFWFKYPKTCSKVEHFVSILGKCFESPWTTKALSETACEDSEENKQRITGAQTLPKHVSTSSDEGSPSASTPMINKTGFKFSAEKPVIEVPSMTILDKKDGEQAKALFEKVRKFRAHVEDSDLIYKLYVVQTVIKTAKFIFILCYTANFVNAISFEHVCKPKVEHLIGYEVFECTHNMAYMLKKLLISYISIICVYGFICLYTLFWLFRIPLKEYSFEKVREESSFSDIPDVKNDFAFLLHMVDQYDQLYSKRFGVFLSEVSENKLREISLNHEWTFEKLRQHISRNAQDKQELHLFMLSGVPDAVFDLTDLDVLKLELIPEAKIPAKISQMTNLQELHLCHCPAKVEQTAFSFLRDHLRCLHVKFTDVAEIPAWVYLLKNLRELYLIGNLNSENNKMIGLESLRELRHLKILHVKSNLTKVPSNITDVAPHLTKLVIHNDGTKLLVLNSLKKMMNVAELELQNCELERIPHAIFSLSNLQELDLKSNNIRTIEEIISFQHLKRLTCLKLWHNKIVTIPPSITHVKNLESLYFSNNKLESLPVAVFSLQKLRCLDVSYNNISMIPIEIGLLQNLQHLHITGNKVDILPKQLFKCIKLRTLNLGQNCITSLPEKVGQLSQLTQLELKGNCLDRLPAQLGQCRMLKKSGLVVEDHLFDTLPLEVKEALNQDINIPFANGI

SEQ ID NO: 199 - protein, 629 aa, Homo sapiens
MIPWPASDRKKSECAFKKKSNEELQDSYLLPISEDKVMEGKGQSPFDPAHKHTAVLVDGMLYSGTMNNFLGSEPILMRTLGSQPVLKTDNFLRWLHHDASFVAAIPSTQVVYFFFEETASEFDFFERLHTSRVARVCKNDVGGEKLLQKKWTTFLKAQLLCTQPGQLPFNVIRHAVLLPADSPTAPHIYAVFTSQWQVGGTRSSAVCAFSLLDIERVFKGKYKELNKETSRWTTYRGPETNPRPGSCSVGPSSDKALTFMKDHFLMDEQVVGTPLLVKSGVEYTRLAVETAQGLDGHSHLVMYLGTTTGSLHKAVVSGDSSAHLVEEIQLFPDPEPVRNLQLAPTQGAVFVGFSGGVWRVPRANCSVYESCVDCVLARDPHCAWDPESRTCCLLSAPNLNSWKQDMERGNPEWACASGPMSRSLRPQSRPQIIKEVLAVPNSILELPCPHLSALASYYWSHGPAAVPEASSTVYNGSLLLIVQDGVGGLYQCWATENGFSYPVISYWVDSQDQTLALDPELAGIPREHVKVPLTRVSGGAALAAQQSYWPHFVTVTVLFALVLSGALIILVASPLRALRARGKVQGCETLRPGEKAPLSREQHLQSPKECRTSASDVDADNNCLGTEVA

SEQ ID NO: 200 - protein, 662 aa, Homo sapiens
MIPWPASDRKKSECAFKKKSNETQCFNFIRVLVSYNVTHLYTCGTFAFSPACTFIELQDSYLLPISEDKVMEGKGQSPFDPAHKHTAVLVDGMLYSGTMNNFLGSEPILMRTLGSQPVLKTDNFLRWLHHDASFVAAIPSTQVVYFFFEETASEFDFFERLHTSRVARVCKNDVGGEKLLQKKWTTFLKAQLLCTQPGQLPFNVIRHAVLLPADSPTAPHIYAVFTSQWQVGGTRSSAVCAFSLLDIERVFKGKYKELNKETSRWTTYRGPETNPRPGSCSVGPSSDKALTFMKDHFLMDEQVVGTPLLVKSGVEYTRLAVETAQGLDGHSHLVMYLGTTTGSLHKAVVSGDSSAHLVEEIQLFPDPEPVRNLQLAPTQGAVFVGFSGGVWRVPRANCSVYESCVDCVLARDPHCAWDPESRTCCLLSAPNLNSWKQDMERGNPEWACASGPMSRSLRPQSRPQIIKEVLAVPNSILELPCPHLSALASYYWSHGPAAVPEASSTVYNGSLLLIVQDGVGGLYQCWATENGFSYPVISYWVDSQDQTLALDPELAGIPREHVKVPLTRVSGGAALAAQQSYWPHFVTVTVLFALVLSGALIILVASPLRALRARGKVQGCETLRPGEKAPLSREQHLQSPKECRTSASDVDADNNCLGTEVA

SEQ ID NO: 201 - protein, 592 aa, Homo sapiens
MEGKGQSPFDPAHKHTAVLVDGMLYSGTMNNFLGSEPILMRTLGSQPVLKTDNFLRWLHHDASFVAAIPSTQVVYFFFEETASEFDFFERLHTSRVARVCKNDVGGEKLLQKKWTTFLKAQLLCTQPGQLPFNVIRHAVLLPADSPTAPHIYAVFTSQWQVGGTRSSAVCAFSLLDIERVFKGKYKELNKETSRWTTYRGPETNPRPGSCSVGPSSDKALTFMKDHFLMDEQVVGTPLLVKSGVEYTRLAVETAQGLDGHSHLVMYLGTTTGSLHKAVVSGDSSAHLVEEIQLFPDPEPVRNLQLAPTQGAVFVGFSGGVWRVPRANCSVYESCVDCVLARDPHCAWDPESRTCCLLSAPNLNSWKQDMERGNPEWACASGPMSRSLRPQSRPQIIKEVLAVPNSILELPCPHLSALASYYWSHGPAAVPEASSTVYNGSLLLIVQDGVGGLYQCWATENGFSYPVISYWVDSQDQTLALDPELAGIPREHVKVPLTRVSGGAALAAQQSYWPHFVTVTVLFALVLSGALIILVASPLRALRARGKVQGCETLRPGEKAPLSREQHLQSPKECRTSASDVDADNNCLGTEVA

SEQ ID NO: 202 - protein, 723 aa, Homo sapiens
MCTVVPAEGDERRALSFFHQKGLQDFDTLLLSGDGNTLYVGAREAILALDIQDPGVPRLKNMIPWPASDRKKSECAFKKKSNETQCFNFIRVLVSYNVTHLYTCGTFAFSPACTFIELQDSYLLPISEDKVMEGKGQSPFDPAHKHTAVLVDGMLYSGTMNNFLGSEPILMRTLGSQPVLKTDNFLRWLHHDASFVAAIPSTQVVYFFFEETASEFDFFERLHTSRVARVCKNDVGGEKLLQKKWTTFLKAQLLCTQPGQLPFNVIRHAVLLPADSPTAPHIYAVFTSQWQVGGTRSSAVCAFSLLDIERVFKGKYKELNKETSRWTTYRGPETNPRPGSCSVGPSSDKALTFMKDHFLMDEQVVGTPLLVKSGVEYTRLAVETAQGLDGHSHLVMYLGTTTGSLHKAVVSGDSSAHLVEEIQLFPDPEPVRNLQLAPTQGAVFVGFSGGVWRVPRANCSVYESCVDCVLARDPHCAWDPESRTCCLLSAPNLNSWKQDMERGNPEWACASGPMSRSLRPQSRPQIIKEVLAVPNSILELPCPHLSALASYYWSHGPAAVPEASSTVYNGSLLLIVQDGVGGLYQCWATENGFSYPVISYWVDSQDQTLALDPELAGIPREHVKVPLTRVSGGAALAAQQSYWPHFVTVTVLFALVLSGALIILVASPLRALRARGKVQGCETLRPGEKAPLSREQHLQSPKECRTSASDVDADNNCLGTEVA

SEQ ID NO: 203 - protein, 761 aa, Homo sapiens; identical to SEQ ID NO: 104

SEQ ID NO: 204 - protein, 662 aa, Homo sapiens; identical to SEQ ID NO: 200

SEQ ID NO: 205 - protein, 335 aa, Homo sapiens
MLWLFQSLLFVFCFGPGNVVSQSSLTPLMVNGILGESVTLPLEFPAGEKVNFITWLFNETSLAFIVPHETKSPEIHVTNPKQGKRLNFTQSYSLQLSNLKMEDTGSYRAQISTKTSAKLSSYTLRILRQLRNIQVTNHSQLFQNMTCELHLTCSVEDADDNVSFRWEALGNTLSSQPNLTVSWDPRISSEQDYTCIAENAVSNLSFSVSAQKLCEDVKIQYTDTKMILFMVSGICIVFGFIILLLLVLRKRRDSLSLSTQRTQGPAESARNLEYVSVSPTNNTVYASVTHSNRETEIWTPRENDTITIYSTINHSKEVSPRLLHVFIFLPLSTDL

SEQ ID NO: 206 - protein, 283 aa, Homo sapiens
MLWLFQSLLFVFCFGPVPHETKSPEIHVTNPKQGKRLNFTQSYSLQLSNLKMEDTGSYRAQISTKTSAKLSSYTLRILRQLRNIQVTNHSQLFQNMTCELHLTCSVEDADDNVSFRWEALGNTLSSQPNLTVSWDPRISSEQDYTCIAENAVSNLSFSVSAQKLCEDVKIQYTDTKMILFMVSGICIVFGFIILLLLVLRKRRDSLSLSTQRTQGPAESARNLEYVSVSPTNNTVYASVTHSNRETEIWTPRENDTITIYSTINHSKESKPTFSRATALDNVV

SEQ ID NO: 207 - protein, 220 aa, Homo sapiens
MLWLFQSLLFVFCFGPGQLRNIQVTNHSQLFQNMTCELHLTCSVEDADDNVSFRWEALGNTLSSQPNLTVSWDPRISSEQDYTCIAENAVSNLSFSVSAQKLCEDVKIQYTDTKMILFMVSGICIVFGFIILLLLVLRKRRDSLSLSTQRTQGPESARNLEYVSVSPTNNTVYASVTHSNRETEIWTPRENDTITIYSTINHSKESKPTFSRATALDNVV

SEQ ID NO: 208 - protein, 184 aa, Homo sapiens; identical to SEQ ID NO: 27
